(19) United States
(12) Patent Application Publication
(10) Pub. No.: US 2015/0376590 A1
(43) Pub. Date: Dec. 31, 2015

(54) Thermotolerant Beta-Glucosidase Variants

(71) Applicants: Jon Peter Flash BARTNEK, Naperville, IL (US); Justin Trent STEGE, Naperville, IL (US); BP Corporation North America Inc., Naperville, IL (US)

(72) Inventors: Jon Peter Flash Bartnek, San Diego, CA (US); Justin Trent Stege, San Diego, CA (US)

(73) Assignee: BP Corporation North America Inc., Naperville, IL (US)

(21) Appl. No.: 14/440,273

(22) PCT Filed: Oct. 30, 2013
(86) PCT No.: PCT/US13/67447

§ 371 Date: May 1, 2015

Related U.S. Application Data
(60) Provisional application No. 61/721,799, filed on Nov. 2, 2012.

(51) Int. Cl. C12N 9/42; C12P 7/14

(52) U.S. Cl. CPC C12N 9/2445; C12P 7/14; C12Y 302/01021

(57) ABSTRACT

The present disclosure relates to variant β-glucosidase polypeptides that have enhanced thermostability, and compositions, e.g., cellulase compositions, comprising variant β-glucosidase polypeptides. The variant β-glucosidase polypeptides and related compositions can be used in variety of agricultural and industrial applications. The present disclosure further relates to nucleic acids encoding variant β-glucosidase polypeptides and host cells that recombinantly express the variant β-glucosidase polypeptides.

### REFERENCE TO SEQUENCE LISTING SUBMITTED VIA EFS-WEB

[0001] This application is being transmitted by EFS-Web, as authorized and set forth in MPEP §502.05, including a sequence listing submitted under 37 C.F.R. §1.821 in ASCII text file (.txt) format.

### BACKGROUND

[0002] Cellulosic biomass is a significant renewable resource for the generation of soluble sugars. These sugars can be used as reactants in various metabolic processes, including fermentation, to produce biofuels, chemical compounds, and other commercially valuable products. For example, fermentation of plant biomass to ethanol is an attractive carbon neutral energy option since the combustion of ethanol from biomass produces no net carbon dioxide in the earth's atmosphere. Further, biomass is readily available, and its fermentation provides an attractive way to dispose of many industrial and agricultural waste products. Finally, plant biomass is a highly renewable resource. Many dedicated energy crops can provide high energy biomass, which may be harvested multiple times each year.

[0003] Cellulose is a polymer of the simple sugar glucose covalently bonded by β-1,4-linkages. Cellulose is the most abundant organic compound on earth, making up about 33 percent of all plant matter, about 50 percent of wood, and about 90 percent of products such as cotton. In nature, cellulose is present as part of the lignocellulosic biomass of plants, which is composed of cellulose, hemicellulose, and lignin. The carbohydrate polymers (cellulose and hemicelluloses) are tightly bound to the lignin, by hydrogen and covalent bonds. Cellulose may be pretreated chemically, mechanically, enzymatically or in other ways to increase the susceptibility of cellulose to hydrolysis. Such pretreatment may be followed by the enzymatic conversion of cellulose to cellobiose, cello-oligosaccharides, glucose, and other sugars and sugar polymers, using enzymes that break down the β-1-4 glycosidic bonds of cellulose. These enzymes are collectively referred to as “cellulases.”

[0004] Cellulases are divided into three sub-categories of enzymes: 1,4-β-D-glucan glucanohydrolase (“endoglucanase” or “EG”); 1,4-β-D-glucan cellobiohydrolase (“exoglucanase”, “cellobiohydrolase”, or “CBH”); and β-D-glucoside-glucohydrolase (“β-glucosidase”, “beta-glucosidase”, “cellobiase” or “BGL”). Endoglucanases break internal bonds and disrupt the crystalline structure of cellulose, exposing individual cellulose polysaccharide chains (“glucans”). Cellobiohydrolases incrementally shorten the glucan molecules, releasing mainly cellobiose units (a water-soluble β-1,4-linked dimer of glucose) as well as glucose, cellotriose, and cellotetraose. β-Glucosidases split cellobiose into glucose monomers.

[0005] Typically, the digestion of cellulose is carried out at high temperatures, at which intermolecular hydrogen bonds are disrupted and recalcitrant cellulose polymers becomes accessible to the cellulase enzymes. Therefore, cellulases used commercially in such processes should be able to withstand high temperatures so as to permit breakdown of cellulose under commercially viable conditions.

[0006] Cellulases with improved properties, such as thermal stability, for use in processing cellulosic biomass would reduce costs and increase the efficiency of production of biofuels and other commercially valuable compounds.

### SUMMARY

[0007] The present disclosure relates to variant β-glucosidase polypeptides. Most naturally occurring β-glucosidases do not perform well at the high temperatures that are optimal for commercial reasons, for example biomass saccharification reactions that utilize cellulase cocktails. The variant β-glucosidase polypeptides of the disclosure have one or more amino acid substitutions that improve performance at temperatures above 50° C. (e.g., 60° C., 66° C., 70° C., or 80° C.). Such variants are sometimes referred to herein as “thermally tolerant” or “thermotolerant.” In some instances, the variants have an increased specific activity towards a β-glucosidase substrate at ambient temperatures (e.g., 22-25° C.).

[0008] Accordingly, the present disclosure provides polypeptides (variant β-glucosidase polypeptides) which have been engineered to incorporate an amino acid substitution that results in increased thermal tolerance, increased specific activity, or both. The variant β-glucosidase polypeptides of the disclosure minimally contain one or more amino acid substitutions selected from Table 1, below, which lists substitution names and corresponding positions in SEQ ID NO:379 and SEQ ID NO:378.

TABLE 1

| | Corresponding position | Corresponding position |
|---|---|---|
| Substitution Name | in SEQ ID NO: 379 | in SEQ ID NO: 378 |
| I63 substitution | I63 | V67 |
| A68 substitution | A68 | E72 |
| A73 substitution | A73 | A77 |
| Y74 substitution | Y74 | Y78 |
| V167 substitution | V167 | C171 |
| V203 substitution | V203 | T207 |
| I216 substitution | I216 | V219 |
| T219 substitution | T219 | T222 |
| K231 substitution | K231 | (none) |
| M246 substitution | M246 | F248 |
| F292 substitution | F292 | I293 |
| S296 substitution | S296 | S297 |
| M325 substitution | M325 | M323 |
| N326 substitution | N326 | N324 |
| E365 substitution | E365 | D363 |
| Y399 substitution | Y399 | F397 |
| V400 substitution | V400 | A398 |
| W401 substitution | W401 | W399 |
| R410 substitution | R410 | A408 |
| D414 substitution | D414 | D412 |
| L427 substitution | L427 | Q425 |
| T441 substitution | T441 | (none) |
| E450 substitution | E450 | A444 |

[0009] The one or more amino acid substitutions can be introduced into a β-glucosidase of SEQ ID NO:378, a β-glucosidase of SEQ ID NO:379, or another, preferably bacterial, β-glucosidase. Amino acid positions in other exemplary β-glucosidase polypeptides corresponding to the foregoing amino acid positions in SEQ ID NO:378 and SEQ ID NO:379 are shown in Tables 9A-9C. One, two, three, four, five, six, seven, eight, nine, or ten or more of the amino acid substitutions listed in Table 1 can by introduced into the β-glucosidase. In certain aspects, one or more amino acid substituents are selected from:
[0010] (a) an A to G substitution in the amino acid corresponding to amino acid 73 of SEQ ID NO:379 (an “A73G substitution”);
[0011] (b) an A to S substitution in the amino acid corresponding to amino acid 73 of SEQ ID NO:379 (an “A73S substitution”);
[0012] (c) a Y to L substitution in the amino acid corresponding to amino acid 74 of SEQ ID NO:379 (a “Y74L substitution”);
[0013] (d) a V to A substitution in the amino acid corresponding to amino acid 167 of SEQ ID NO:379 (a “V167A substitution”);
[0014] (e) a T to A substitution in the amino acid corresponding to amino acid 219 of SEQ ID NO:379 (a “T219A substitution”);
[0015] (f) a T to S substitution in the amino acid corresponding to amino acid 219 of SEQ ID NO:379 (a “T219S substitution”);
[0016] (g) a K to E substitution in the amino acid corresponding to amino acid 231 of SEQ ID NO:379 (a “K231E substitution”);
[0017] (h) a M to H substitution in the amino acid corresponding to amino acid 246 of SEQ ID NO:379 (a “M246H substitution”);
[0018] (i) a M to K substitution in the amino acid corresponding to amino acid 246 of SEQ ID NO:379 (a “M246K substitution”);
[0019] (j) a F to I substitution in the amino acid corresponding to amino acid 292 of SEQ ID NO:379 (a “F292I substitution”);
[0020] (k) a F to V substitution in the amino acid corresponding to amino acid 292 of SEQ ID NO:379 (a “F292V substitution”);
[0021] (l) a S to T substitution in the amino acid corresponding to amino acid 296 of SEQ ID NO:379 (a “S296T substitution”);
[0022] (m) a M to T substitution in the amino acid corresponding to amino acid 325 of SEQ ID NO:379 (a “M325T substitution”);
[0023] (n) a N to G substitution in the amino acid corresponding to amino acid 326 of SEQ ID NO:379 (a “N326G substitution”);
[0024] (o) a Y to F substitution in the amino acid corresponding to amino acid 399 of SEQ ID NO:379 (a “Y399F substitution”);
[0025] (p) a W to F substitution in the amino acid corresponding to amino acid 401 of SEQ ID NO:379 (a “W401F substitution”);
[0026] (q) a T to V substitution in the amino acid corresponding to amino acid 441 of SEQ ID NO:379 (a “T441V substitution”); and
[0027] (r) an A to C substitution in the amino acid corresponding to amino acid 449 of SEQ ID NO:379 (a “A449C substitution”).

[0028] In certain embodiments, the β-glucosidase variants of the disclosure include one or more, two or more, or three or more of: an M246H substitution, an I216V substitution, and a T219A substitution.

[0029] In yet other embodiments, the β-glucosidase variants of the disclosure include a polypeptide comprising a variant β-glucosidase polypeptide as compared to a reference β-glucosidase polypeptide, comprising one or more, two or more, three or more, four or more, five or more, six or more, seven or more, or eight substitutions selected from:
[0030] (a) a D7H substitution;
[0031] (b) a D154N substitution;
[0032] (c) an I216V substitution;
[0033] (d) a D243H substitution;
[0034] (e) a D302R substitution;
[0035] (f) an S317H substitution;
[0036] (g) an E365G substitution; and
[0037] (h) a V400Y substitution.

[0038] In some embodiments, a β-glucosidase variant of the disclosure comprises SEQ ID NO:267.

[0039] The β-glucosidase polypeptides of the disclosure generally retain at least 1%, at least 2%, at least 5%, at least 10% and more preferably at least 20% of their specific activity at ambient temperature (22-25° C.) following a 30-minute thermal challenge at 66° C., as compared to wild type β-glucosidase which does not include the same amino acid substitutions. In specific embodiments, the β-glucosidase polypeptides of the disclosure generally retain at least 30%, at least 40%, at least 50%, at least 60%, at least 70% or at least 80% of their specific activity at ambient temperature (22-25° C.) following a 30-minute thermal challenge at 66° C. In certain aspects, the β-glucosidase polypeptides of the disclosure generally retain a percentage of specific activity following a 30-minute thermal challenge at 66° C. that ranges from 1%-50%, 1%-90%, 2%-80%, 2%-40%, 5%-50%, 5%-70%, 10%-90%, 20%-60%, 30%-90%, 30%-80%, or 40%-80% of their activity at ambient temperature (22-25° C.), or a percentage of specific activity in a range bounded by any two of these values (for example 1%-60%, 20%-70%, and so on and so forth).

[0040] In certain embodiments, the β-glucosidase polypeptides of the disclosure also retain at least 1%, at least 2%, at least 5%, at least 10% and more preferably at least 20% of their specific activity at ambient temperature (22-25° C.) following a 30-minute thermal challenge at 70° C., 80° C., 84° C. or 86° C. as compared to wild type β-glucosidase which does not include the same amino acid substitutions. In specific embodiments, the β-glucosidase polypeptides of the disclosure generally retain at least 30%, at least 40%, at least 50%, at least 60%, at least 70% or at least 80% of their specific activity at ambient temperature (22-25° C.) following a 30-minute thermal challenge at 70° C., 80° C., 84° C. or 86° C. In certain aspects, the β-glucosidase polypeptides of the disclosure generally retain a percentage of specific activity following a 30-minute thermal challenge at 70° C., 80° C., 84° C. or 86° C. that ranges from 1%-50%, 1%-90%, 2%-80%, 2%-40%, 5%-50%, 5%-70%, 10%-90%, 20%-60%, 30%-90%, 30%-80%, or 40%-80% of their activity at ambient temperature (22-25° C.), or a percentage of specific activity in a range bounded by any two of these values (for example 1%-60%, 20%-70%, and so on and so forth).

[0041] The variant β-glucosidase polypeptides of the disclosure typically include an amino acid sequence having at least 40%, at least 45%, at least 48%, at least 50%, at least 60%, at least 70%, at least 80%, at least 90%, at least 95%, or at least 97% sequence identity to the amino acid sequence of SEQ ID NO:378 and/or the amino acid sequence of SEQ ID NO:379. The variant β-glucosidase polypeptides can further include a purification tag, e.g., a histidine tag. Additional embodiments of variant β-glucosidase polypeptides are provided in Section 4.1.

[0042] The present disclosure further provides compositions (including cellulase compositions, e.g., whole cellulase compositions, and fermentation broths) comprising variant β-glucosidase polypeptides. Additional embodiments of compositions comprising variant β-glucosidase polypeptides are provided in Section 4.4. The variant β-glucosidase polypeptides and compositions comprising them can be used, inter alia, in processes for saccharifying biomass. Additional details of saccharification reactions, and additional applications of the variant β-glucosidase polypeptides, are provided in Section 4.5.

[0043] The present disclosure further provides nucleic acids (e.g., vectors) comprising nucleotide sequences encoding variant β-glucosidase polypeptides as described herein in section 4.2, and recombinant cells engineered to express the variant β-glucosidase polypeptides. The recombinant cell can be a prokaryotic (e.g., bacterial) or eukaryotic (e.g., yeast or filamentous fungal) cell. For recombinant expression in eukaryotic cells, the variant β-glucosidase polypeptides of the disclosure can further include a signal peptide for secretion in the culture media. Further provided are methods of producing and optionally recovering the variant β-glucosidase polypeptides. Additional embodiments of the recombinant expression system suitable for expression and production of the variant β-glucosidase polypeptides are provided in Section 4.3.

### BRIEF DESCRIPTION OF THE FIGURES

[0044] FIG. 1 provides a map of a vector used for constructing hexahistidine-tagged β-glucosidase constructs.

[0045] FIG. 2 provides data showing the residual activity of wild-type β-glucosidase after 30-minute thermal challenges at the indicated temperatures, serving as the rationale for selecting 66° C. as the temperature for screening the GSSM library.

[0046] FIG. 3 provides GSSM thermotolerance screen data for various β-glucosidase variants, with wild-type β-glucosidase activity indicated by the arrows, negative controls marked with an asterisk (*), and a putative thermotolerant β-glucosidase variant highlighted by a circle.

[0047] FIG. 4 provides GSSM re-confirmation data, showing results for triplicate assays of β-glucosidase activity for various β-glucosidase variants, with wild-type β-glucosidase activity indicated by the arrows, negative controls marked with an asterisk (*), and putative thermotolerant β-glucosidase variants highlighted by a circle.

[0048] TABLE 1 shows amino acid positions that can be substituted in various β-glucosidase variants.

[0049] TABLE 2 shows the residual activity remaining following 30-minute thermal challenges at the indicated temperatures for the polypeptides given by SEQ ID NOs:378 and 379.

[0050] TABLE 3 shows secondary thermotolerance screen of GSSM mutants.

[0051] TABLE 4 shows activity of three thermostable GSSM mutants.

[0052] TABLE 5 shows the specific activity after challenge at the indicated temperatures, for the indicated β-glucosidase variants.

[0053] TABLE 6A shows the specific activity after challenge at the indicated temperatures, for the indicated β-glucosidase variants of the reassembly library for original parental β-glucosidase.

[0054] TABLE 6B shows the specific activity after challenge at the indicated temperatures, for the indicated β-glucosidase variants of the reassembly library for alternate parental β-glucosidase.

[0055] TABLE 8 shows substitutions and specific activity after challenge at the indicated temperatures, for the indicated β-glucosidase variants of the reassembly library for original parental β-glucosidase.

[0056] TABLE 8 shows substitutions and specific activity after challenge at the indicated temperatures, for the indicated β-glucosidase variants of the reassembly library for alternate parental β-glucosidase.

[0057] TABLES 9A-9C show the amino acids in a β-glucosidase of SEQ ID NO:379 that can be substituted to generate thermotolerant β-glucosidase variants, and the corresponding amino acid in other β-glucosidases, including β-glucosidase, of SEQ ID NO:378 and SEQ ID NO:380 (a fusion protein of β-glucosidase SEQ ID NO:379 with a C-terminal histidine tag). Other β-glucosidases are identified by patent publication number and sequence identifier within the patent publication. Thus, “U.S. Pat. No. 8,101,393-0094” refers to SEQ ID NO:94 in U.S. Pat. No. 8,101,393. Table 9A-9C also include β-glucosidases identified by their Protein Data Bank (PDB) and European Molecular Biology Laboratory (EMBL) database accession numbers. All the sequences referred to in Tables 9A-9C are incorporated by reference herein.

### DETAILED DESCRIPTION

[0058] The present disclosure relates to variants of a parent β-glucosidase polypeptide, comprising one or more substitutions that result in improved thermal stability and/or specific activity. In various embodiments the variant has improved thermostability compared to the β-glucosidase polypeptide given by SEQ ID NO:378 and/or SEQ ID NO:379. The following subsections describe in greater detail the variant β-glucosidase polypeptides and nucleic acids, as well as exemplary methods of their production, exemplary cellulase compositions comprising them, and some industrial applications of the polypeptides and cellulase compositions.

[0059] 1.1. Variant β-Glucosidase Polypeptides

[0060] β-Glucosidases are cellulase enzymes that split cellobiose into glucose monomers. In some embodiments, the present disclosure provides variants of a parent β-glucosidase polypeptide, comprising one or more substitutions that result in improved thermal stability and/or specific activity. A “parent” β-glucosidase refers to a reference polypeptide sequence, with respect to which one or more amino acid substitutions described herein may be made. A parent β-glucosidase can, but need not be a wild-type β-glucosidase. The term “wild-type” β-glucosidase denotes a β-glucosidase expressed by a naturally occurring microorganism, such as bacterium or yeast found in nature.

[0061] In some embodiments, the disclosure provides a polypeptide comprising the amino acid sequence of a variant β-glucosidase, said variant β-glucosidase comprising one or more substitutions as compared to a reference β-glucosidase polypeptide, said one or more substitutions being selected from: a substitution at the amino acid position corresponding to Q3 of SEQ ID NO:379 (a “Q3 substitution”); a substitution at the amino acid position corresponding to K6 of SEQ ID NO:379 (a “K6 substitution”); a substitution at the amino acid position corresponding to D7 of SEQ ID NO:379 (a “D7 substitution”); a substitution at the amino acid position corresponding to T24 of SEQ ID NO:379 (a “T24 substitution”); a substitution at the amino acid position corresponding to V60 of SEQ ID NO:379 (a “V60 substitution”); a substitution at the amino acid position corresponding to I63 of SEQ ID NO:379 (an “I63 substitution”); a substitution at the amino acid position corresponding to A68 of SEQ ID NO:379 (an “A68 substitution”); a substitution at the amino acid position corresponding to A73 of SEQ ID NO:379 (an “A73 substitution”); a substitution at the amino acid position corresponding to Y74 of SEQ ID NO:379 (a “Y74 substitution”); a substitution at the amino acid position corresponding to E105 of SEQ ID NO:379 (an “E105 substitution”); a substitution at the amino acid position corresponding to Q139 of SEQ ID NO:379 (a “Q139 substitution”); a substitution at the amino acid position corresponding to Q142 of SEQ ID NO:379 (a “Q142 substitution”); a substitution at the amino acid position corresponding to D154 of SEQ ID NO:379 (a “D154 substitution”); a substitution at the amino acid position corresponding to V167 of SEQ ID NO:379 (a “V167 substitution”); a substitution at the amino acid position corresponding to N175 of SEQ ID NO:379 (a “N175 substitution”); a substitution at the amino acid position corresponding to V203 of SEQ ID NO:379 (a “V203 substitution”); a substitution at the amino acid position corresponding to I216 of SEQ ID NO:379 (a “I216 substitution”); a substitution at the amino acid position corresponding to T219 of SEQ ID NO:379 (a “T219 substitution”); a substitution at the amino acid position corresponding to K231 of SEQ ID NO:379 (a “K231 substitution”); a substitution at the amino acid position corresponding to D243 of SEQ ID NO:379 (a “D243 substitution”); a substitution at the amino acid position corresponding to M246 of SEQ ID NO:379 (a “M246 substitution”); a substitution at the amino acid position corresponding to F292 of SEQ ID NO:379 (a “F292 substitution”); a substitution at the amino acid position corresponding to S296 of SEQ ID NO:379 (a “S296 substitution”); a substitution at the amino acid position corresponding to T297 of SEQ ID NO:379 (a “T297 substitution”); a substitution at the amino acid position corresponding to D302 of SEQ ID NO:379 (a “D302 substitution”); a substitution at the amino acid position corresponding to H315 of SEQ ID NO:379 (an “H315 substitution”); a substitution at the amino acid position corresponding to S317 of SEQ ID NO:379 (an “S317 substitution”); a substitution at the amino acid position corresponding to M325 of SEQ ID NO:379 (an “M325 substitution”); a substitution at the amino acid position corresponding to N326 of SEQ ID NO:379 (an “N326 substitution”); a substitution at the amino acid position corresponding to N332 of SEQ ID NO:379 (an “N332 substitution”); a substitution at the amino acid position corresponding to E365 of SEQ ID NO:379 (an “E365 substitution”); a substitution at the amino acid position corresponding to Q366 of SEQ ID NO:379 (a “Q366 substitution”); a substitution at the amino acid position corresponding to I378 SEQ ID NO:379 (an “I378 substitution”); a substitution at the amino acid position corresponding to Y399 SEQ ID NO:379 (a “Y399 substitution”); a substitution at the amino acid position corresponding to V400 SEQ ID NO:379 (a “V400 substitution”); a substitution at the amino acid position corresponding to W401 SEQ ID NO:379 (a “W401 substitution”); a substitution at the amino acid position corresponding to S402 SEQ ID NO:379 (an “S402 substitution”); a substitution at the amino acid position corresponding to R410 SEQ ID NO:379 (an “R410 substitution”); a substitution at the amino acid position corresponding to D414 SEQ ID NO:379 (a “D414 substitution”); a substitution at the amino acid position corresponding to K415 SEQ ID NO:379 (a “K415 substitution”); a substitution at the amino acid position corresponding to R416 SEQ ID NO:379 (an “R416 substitution”); a substitution at the amino acid position corresponding to V420 SEQ ID NO:379 (a “V420 substitution”); a substitution at the amino acid position corresponding to L427 SEQ ID NO:379 (an “L427 substitution”); a substitution at the amino acid position corresponding to E428 SEQ ID NO:379 (an “E428 substitution”); a substitution at the amino acid position corresponding to T441 SEQ ID NO:379 (a “T441 substitution”); a substitution at the amino acid position corresponding to L447 SEQ ID NO:379 (an “L447 substitution”); a substitution at the amino acid position corresponding to A449 SEQ ID NO:379 (an “A449 substitution”); a substitution at the amino acid position corresponding to E450 SEQ ID NO:379 (an “E450 substitution”); and a substitution at the amino acid position corresponding to K451 SEQ ID NO:379 (a “K451 substitution”); wherein the one or more substitutions increases thermotolerance as compared to the reference β-glucosidase polypeptide.

[0062] In some embodiments, the each of the one or more substitutions is selected from: an A73 substitution selected from A73G and A73S; a Y74 substitution that is Y74L; a V167 substitution that is V167A; a T219 substitution selected from T219A and T219S; a K231 substitution that is K231E; an M246 substitution selected from M246H and M246K; an F292 substitution selected from F292I and F292V; an S296 substitution that is S296T; an M325 substitution that is M325T; an N326 substitution that is N326G; a Y399 substitution that is Y399F; a W401 substitution that is W401F; a T441 substitution that is T441V; and an A449 substitution that is A449C.

[0063] The variant β-glucosidase polypeptides of the disclosure can have amino acid substitutions with respect to the reference polypeptide given by SEQ ID NO:379, or with respect to the reference polypeptide given by SEQ ID NO:378, or with respect to any of the reference polypeptides.

[0064] With respect to the reference polypeptide given by SEQ ID NO:379, a variant β-glucosidase polypeptide can have one or more, two or more, three or more, four or more, five or more, six or more, seven or more, eight or more, nine or more, ten or more, eleven or more, twelve or more, or thirteen substitutions selected from the group consisting of: D7H, Y74L, D154N, I216V, T219A, T219S, M246H, M246K, F292V, F292I, S296T, Y399F, V400Y, and W401F.

[0065] With respect to the reference polypeptide given by SEQ ID NO:379, a variant β-glucosidase polypeptide can have one or more, two or more, three or more, four or more, five or more, six or more, seven or more, eight or more, or nine substitutions selected from the group consisting of D11H, T222A, T222S, D245H, F248H, F248K, I293V, S297T, H303R, R315H, and D363G.

[0066] Amino acid positions in other β-glucosidase polypeptides that correspond to substitutions listed herein can be identified through alignment of their sequences with a β-glucosidase of SEQ ID NO:378 or SEQ ID NO:379. Optimal alignment of sequences for comparison can be conducted, e.g., by the local homology algorithm of Smith & Waterman, 1981, Adv. Appl. Math. 2:482-89; by the homology alignment algorithm of Needleman & Wunsch, 1970, J. Mol. Biol. 48:443-53; by the search for similarity method of Pearson & Lipman, 1988, Proc. Nat'l Acad. Sci. USA 85:2444-48, by computerized implementations of these algorithms (GAP, BESTFIT, FASTA, and TFASTA in the Wisconsin Genetics Software Package, Genetics Computer Group, 575 Science Dr., Madison, Wis.), or by visual inspection.

[0067] The variant β-glucosidase polypeptides of the disclosure have one or more amino acid substitutions that improve performance at temperatures above 50° C. (e.g., 60° C., 66° C., 70° C., or 80° C.). Such variants are sometimes referred to herein as “thermally tolerant” or “thermotolerant.” In some instances, the variants have an increased specific activity towards a β-glucosidase substrate at ambient temperatures (e.g., 22-25° C.).

[0068] In some instances, the variants have increased residual activity following a thermal challenge, compared to a reference β-glucosidase. A thermal challenge involves incubating a variant at a temperature of about 50° C., about 55° C., about 60° C., about 65° C., about 66° C., about 68° C., about 70° C., about 80° C., about 82° C., about 84° C., about 86° C., about 88° C., about 90° C., or greater than 90° C. for a period of time, which can be 10 minutes, 15 minutes, 20 minutes, 25 minutes, 30 minutes, 35 minutes, 40 minutes, 45 minutes, 50 minutes, 60 minutes, or greater than one hour.

[0069] a (e.g., a 30-minute thermal challenge at 66° C., a 30-minute thermal challenge at 70° C., or a 30-minute thermal challenge at 80° C.).

[0070] The β-glucosidase variants can have improved thermal activity compared to wild-type β-glucosidase. In some embodiments, the thermal activity of the variant β-glucosidase is at least 1.5-fold, preferably at least 2-fold, more preferably at least 5-fold, most preferably at least 7-fold, and most preferably at least 10-fold, and most preferable at least 20-fold more thermally active than the parent enzyme when residual activity is compared following a 30-minute thermal challenge, for example as described in Example(s) 1-3, below.

[0071] The property of improved thermal activity can also be referred to as increased thermotolerance or thermal stability.

[0072] 1.2. Nucleic Acids Encoding Variant β-Glucosidases

[0073] The present disclosure further provides nucleic acids (e.g., vectors) comprising nucleotide sequences encoding variant β-glucosidase polypeptides as described herein, and recombinant cells engineered to express the variant β-glucosidase polypeptides.

[0074] The disclosure provides isolated, synthetic or recombinant nucleic acids comprising a nucleic acid sequence having at least about 50%, 51%, 52%, 53%, 54%, 55%, 56%, 57%, 58%, 59%, 60%, 61%, 62%, 63%, 64%, 65%, 66%, 67%, 68%, 69%, 70%, 71%, 72%, 73%, 74%, 75%, 76%, 77%, 78%, 79%, 80%, 81%, 82%, 83%, 84%, 85%, 86%, 87%, 88%, 89%, 90%, 91%, 92%, 93%, 94%, 95%, 96%, 97%, 98%, 99%, or more, or complete (100%) sequence identity (homology) to an exemplary nucleic acid of the disclosure, including SEQ ID NO:1; SEQ ID NO:2; SEQ ID NO:3; SEQ ID NO:4; SEQ ID NO:5; SEQ ID NO:6; SEQ ID NO:7; SEQ ID NO:8; SEQ ID NO:9; SEQ ID NO:10; SEQ ID NO:11; SEQ ID NO:12; SEQ ID NO:13; SEQ ID NO:14; SEQ ID NO:15; SEQ ID NO:16; SEQ ID NO:17; SEQ ID NO:18; SEQ ID NO:19; SEQ ID NO:20; SEQ ID NO:21; SEQ ID NO:22; SEQ ID NO:23; SEQ ID NO:24; SEQ ID NO:5; SEQ ID NO:26; SEQ ID NO:27; SEQ ID NO:28; SEQ ID NO:29; SEQ ID NO:30; SEQ ID NO:31; SEQ ID NO:32; SEQ ID NO:33; SEQ ID NO:34; SEQ ID NO:35; SEQ ID NO:36; SEQ ID NO:37; SEQ ID NO:38; SEQ ID NO:39; SEQ ID NO:40; SEQ ID NO:41; SEQ ID NO:42; SEQ ID NO:43; SEQ ID NO:44; SEQ ID NO:45; SEQ ID NO:46; SEQ ID NO:47; SEQ ID NO:48; SEQ ID NO:49; SEQ ID NO:50; SEQ ID NO:51; SEQ ID NO:52; SEQ ID NO:53; SEQ ID NO:54; SEQ ID NO:55; SEQ ID NO:56; SEQ ID NO:57; SEQ ID NO:58; SEQ ID NO:59; SEQ ID NO:60; SEQ ID NO:61; SEQ ID NO:62; SEQ ID NO:63; SEQ ID NO:64; SEQ ID NO:65; SEQ ID NO:66; SEQ ID NO:67; SEQ ID NO:68; SEQ ID NO:69; SEQ ID NO:70; SEQ ID NO:71; SEQ ID NO:72; SEQ ID NO:73; SEQ ID NO:74; SEQ ID NO:75; SEQ ID NO:76; SEQ ID NO:77; SEQ ID NO:78; SEQ ID NO:79; SEQ ID NO:80; SEQ ID NO:81; SEQ ID NO:82; SEQ ID NO:83; SEQ ID NO:84; SEQ ID NO:85; SEQ ID NO:86; SEQ ID NO:87; SEQ ID NO:88; SEQ ID NO:89; SEQ ID NO:90; SEQ ID NO:91; SEQ ID NO:92; SEQ ID NO:93; SEQ ID NO:94; SEQ ID NO:95; SEQ ID NO:96; SEQ ID NO:97; SEQ ID NO:98; SEQ ID NO:99; SEQ ID NO:100; SEQ ID NO:101; SEQ ID NO:102; SEQ ID NO:103; SEQ ID NO:104; SEQ ID NO:105; SEQ ID NO:106; SEQ ID NO:107; SEQ ID NO:108; SEQ ID NO:109; SEQ ID NO:110; SEQ ID NO:111; SEQ ID NO:112; SEQ ID NO:113; SEQ ID NO:114; SEQ ID NO:115; SEQ ID NO:116; SEQ ID NO:117; SEQ ID NO:118; SEQ ID NO:119; SEQ ID NO:120; SEQ ID NO:121; SEQ ID NO:122; SEQ ID NO:123; SEQ ID NO:124; SEQ ID NO:15; SEQ ID NO:126; SEQ ID NO:127; SEQ ID NO:128; SEQ ID NO:129; SEQ ID NO:130; SEQ ID NO:131; SEQ ID NO:132; SEQ ID NO:133; SEQ ID NO:134; SEQ ID NO:135; SEQ ID NO:136; SEQ ID NO:137; SEQ ID NO:138; SEQ ID NO:139; SEQ ID NO:140; SEQ ID NO:141; SEQ ID NO:142; SEQ ID NO:143; SEQ ID NO:144; SEQ ID NO:145; SEQ ID NO:146; SEQ ID NO:147; SEQ ID NO:148; SEQ ID NO:149; SEQ ID NO:150; SEQ ID NO:151; SEQ ID NO:152; SEQ ID NO:153; SEQ ID NO:154; SEQ ID NO:155; SEQ ID NO:156; SEQ ID NO:157; SEQ ID NO:158; SEQ ID NO:159; SEQ ID NO:160; SEQ ID NO:161; SEQ ID NO:162; SEQ ID NO:163; SEQ ID NO:164; SEQ ID NO:165; SEQ ID NO:166; SEQ ID NO:167; SEQ ID NO:168; SEQ ID NO:169; SEQ ID NO:170; SEQ ID NO:171; SEQ ID NO:172; SEQ ID NO:173; SEQ ID NO:174; SEQ ID NO:175; SEQ ID NO:176; SEQ ID NO:177; SEQ ID NO:178; SEQ ID NO:179; SEQ ID NO:180; SEQ ID NO:181; SEQ ID NO:182; SEQ ID NO:183; SEQ ID NO:184; SEQ ID NO:185; SEQ ID NO:186; SEQ ID NO:187; SEQ ID NO:188; SEQ ID NO:189; SEQ ID NO:190; SEQ ID NO:191; SEQ ID NO:192; SEQ ID NO:193; SEQ ID NO:194; SEQ ID NO:195; SEQ ID NO:196; SEQ ID NO:197; SEQ ID NO:198; and/or SEQ ID NO:381; which in alternative embodiments include complementary (partially or completely complementary) (e.g., antisense) sequence, cDNA coding sequences and genomic (e.g., “gDNA”) sequences, and optionally include sequences over a region of at least about 10, 15, 20, 25, 30, 35, 40, 45, 50, 75, 100, 150, 200, 250, 300, 350, 400, 450, 500, 550, 600, 650, 700, 750, 800, 850, 900, 950, 1000, 1050, 1100, 1150, 1200, 1250, 1300, 1350, 1400, 1450, 1500, 1550, 1600, 1650, 1700, 1750, 1800, 1850, 1900, 1950, 2000, 2050, 2100, 2200, 2250, 2300, 2350, 2400, 2450, 2500, or more residues; or over a region consisting of the protein coding region (e.g., the cDNA) or the genomic sequence; and all of these nucleic acid sequences, and the polypeptides and peptides they encode, encompass “sequences of the disclosure”.

[0075] Nucleic acids of the disclosure also include isolated, synthetic or recombinant nucleic acids encoding an exemplary polypeptide (or peptide) of the disclosure which include polypeptides (e.g., enzymes) of the disclosure having the sequence of (or the subsequences of, or enzymatically active fragments of) SEQ ID NO:200; SEQ ID NO:201; SEQ ID NO:202; SEQ ID NO:203; SEQ ID NO:204; SEQ ID NO:205; SEQ ID NO:206; SEQ ID NO:207; SEQ ID NO:208; SEQ ID NO:209; SEQ ID NO:210; SEQ ID NO:211; SEQ ID NO:212; SEQ ID NO:213; SEQ ID NO:214; SEQ ID NO:215; SEQ ID NO:216; SEQ ID NO:217; SEQ ID NO:218; SEQ ID NO:219; SEQ ID NO:220; SEQ ID NO:221; SEQ ID NO:222; SEQ ID NO:223; SEQ ID NO:224; SEQ ID NO:25; SEQ ID NO:226; SEQ ID NO:227; SEQ ID NO:228; SEQ ID NO:229; SEQ ID NO:230; SEQ ID NO:231; SEQ ID NO:232; SEQ ID NO:233; SEQ ID NO:234; SEQ ID NO:235; SEQ ID NO:236; SEQ ID NO:237; SEQ ID NO:238; SEQ ID NO:239; SEQ ID NO:240; SEQ ID NO:241; SEQ ID NO:242; SEQ ID NO:243; SEQ ID NO:244; SEQ ID NO:245; SEQ ID NO:246; SEQ ID NO:247; SEQ ID NO:248; SEQ ID NO:249; SEQ ID NO:250; SEQ ID NO:251; SEQ ID NO:252; SEQ ID NO:253; SEQ ID NO:254; SEQ ID NO:255; SEQ ID NO:256; SEQ ID NO:257; SEQ ID NO:258; SEQ ID NO:259; SEQ ID NO:260; SEQ ID NO:261; SEQ ID NO:262; SEQ ID NO:263; SEQ ID NO:264; SEQ ID NO:265; SEQ ID NO:266; SEQ ID NO:267; SEQ ID NO:268; SEQ ID NO:269; SEQ ID NO:270; SEQ ID NO:271; SEQ ID NO:272; SEQ ID NO:273; SEQ ID NO:274; SEQ ID NO:275; SEQ ID NO:276; SEQ ID NO:277; SEQ ID NO:278; SEQ ID NO:279; SEQ ID NO:280; SEQ ID NO:281; SEQ ID NO:282; SEQ ID NO:283; SEQ ID NO:284; SEQ ID NO:285; SEQ ID NO:286; SEQ ID NO:287; SEQ ID NO:288; SEQ ID NO:289; SEQ ID NO:290; SEQ ID NO:291; SEQ ID NO:292; SEQ ID NO:293; SEQ ID NO:294; SEQ ID NO:295; SEQ ID NO:296; SEQ ID NO:297; SEQ ID NO:298; SEQ ID NO: 299; SEQ ID NO:300; SEQ ID NO:301; SEQ ID NO:302; SEQ ID NO:303; SEQ ID NO:304; SEQ ID NO:305; SEQ ID NO:306; SEQ ID NO:307; SEQ ID NO:308; SEQ ID NO:309; SEQ ID NO:310; SEQ ID NO:311; SEQ ID NO:312; SEQ ID NO:313; SEQ ID NO:314; SEQ ID NO:315; SEQ ID NO:316; SEQ ID NO:317; SEQ ID NO:318; SEQ ID NO:319; SEQ ID NO:320; SEQ ID NO:321; SEQ ID NO:322; SEQ ID NO:323; SEQ ID NO:324; SEQ ID NO:35; SEQ ID NO:326; SEQ ID NO:327; SEQ ID NO:328; SEQ ID NO:329; SEQ ID NO:330; SEQ ID NO:331; SEQ ID NO:332; SEQ ID NO:333; SEQ ID NO:334; SEQ ID NO:335; SEQ ID NO:336; SEQ ID NO:337; SEQ ID NO:338; SEQ ID NO:339; SEQ ID NO:340; SEQ ID NO:341; SEQ ID NO:342; SEQ ID NO:343; SEQ ID NO:344; SEQ ID NO:345; SEQ ID NO:346; SEQ ID NO:347; SEQ ID NO:348; SEQ ID NO:349; SEQ ID NO:350; SEQ ID NO:351; SEQ ID NO:352; SEQ ID NO:353; SEQ ID NO:354; SEQ ID NO:355; SEQ ID NO:356; SEQ ID NO:357; SEQ ID NO:358; SEQ ID NO:359; SEQ ID NO:360; SEQ ID NO:361; SEQ ID NO:362; SEQ ID NO:363; SEQ ID NO:364; SEQ ID NO:365; SEQ ID NO:366; SEQ ID NO:367; SEQ ID NO:368; SEQ ID NO:369; SEQ ID NO:370; SEQ ID NO:371; SEQ ID NO:372; SEQ ID NO:373; SEQ ID NO:374; SEQ ID NO:375; SEQ ID NO:376; SEQ ID NO:377; SEQ ID NO:378; SEQ ID NO:379; and/or SEQ ID NO:380;

[0076] 1.3. Recombinant Expression of Variant β-Glucosidase Polypeptides

[0077] 1.3.1. Cell Culture Systems

[0078] The disclosure also provides recombinant cells engineered to express variant β-glucosidase polypeptides. Suitably, the variant β-glucosidase polypeptide is encoded by a nucleic acid operably linked to a promoter.

[0079] Where recombinant expression in a filamentous fungal host is desired, the promoter can be a filamentous fungal promoter. The nucleic acids can be, for example, under the control of heterologous promoters. The variant β-glucosidase polypeptides can also be expressed under the control of constitutive or inducible promoters. Examples of promoters that can be used include, but are not limited to, a cellulase promoter, a xylanase promoter, the 1818 promoter (previously identified as a highly expressed protein by EST mapping Trichoderma), and a viral promoter. For example, the promoter can suitably be a cellobiohydrolase, endoglucanase, or β-glucosidase promoter. A particularly suitable promoter can be, for example, a T. reesei cellobiohydrolase, endoglucanase, or β-glucosidase promoter. Non-limiting examples of promoters include a cbh1, cbh2, egl1, egl2, egl3, egl4, egl5, pki1, gpd1, xyn1, or xyn2 promoter.

[0080] Suitable host cells include cells of any microorganism (e.g., cells of a bacterium, a protist, an alga, a fungus (e.g., a yeast or filamentous fungus), or other microbe), and are preferably cells of a bacterium, a yeast, or a filamentous fungus.

[0081] When expressing in a eukaryotic host cell, a recombinant variant β-glucosidase polypeptide could be fused to a signal peptide (also known as a signal sequence) in order to promote secretion. Signal peptides and methods of attaching them to recombinant polypeptides are known in the art.

[0082] Suitable host cells of the bacterial genera include, but are not limited to, cells of Escherichia, Bacillus, Lactobacillus, Pseudomonas, and Streptomyces. Suitable cells of bacterial species include, but are not limited to, cells of Escherichia coli, Bacillus subtilis, Bacillus licheniformis, Lactobacillus brevis, Pseudomonas aeruginosa, and Streptomyces lividans.

[0083] Suitable host cells of the genera of yeast include, but are not limited to, cells of Saccharomyces, Schizosaccharomyces, Candida, Hansenula, Pichia, Kluyveromyces, and Phaffia. Suitable cells of yeast species include, but are not limited to, cells of Saccharomyces cerevisiae, Schizosaccharomyces pombe, Candida albicans, Hansenula polymorpha, Pichia pastoris, P. canadensis, Kluyveromyces marxianus, and Phaffia rhodozyma.

[0084] Suitable host cells of filamentous fungi include all filamentous forms of the subdivision Eumycotina. Suitable cells of filamentous fungal genera include, but are not limited to, cells of Acremonium, Aspergillus, Aureobasidium, Bjerkandera, Ceriporiopsis, Chrysoporium, Coprinus, Coriolus, Corynascus, Chaetomium, Cryptococcus, Filobasidium, Fusarium, Gibberella, Humicola, Hypocrea, Magnaporthe, Mucor, Myceliophthora, Mucor, Neocallimastix, Neurospora, Paecilomyces, Penicillium, Phanerochaete, Phlebia, Piromyces, Pleurotus, Scytaldium, Schizophyllum, Sporotrichum, Talaromyces, Thermoascus, Thielavia, Tolypocladium, Trametes, and Trichoderma. More preferably, the recombinant cell is a Trichoderma sp. (e.g., Trichoderma reesei), Penicillium sp., Humicola sp. (e.g., Humicola insolens); Aspergillus sp. (e.g., Aspergillus niger), Chrysosporium sp., Fusarium sp., or Hypocrea sp. Suitable cells can also include cells of various anamorph and teleomorph forms of these filamentous fungal genera.

[0085] Suitable cells of filamentous fungal species include, but are not limited to, cells of Aspergillus awamori, Aspergillus fumigatus, Aspergillus foetidus, Aspergillus japonicus, Aspergillus nidulans, Aspergillus niger, Aspergillus oryzae, Chrysosporium lucknowense, Fusarium bactridioides, Fusarium cerealis, Fusarium crookwellense, Fusarium culmorum, Fusarium graminearum, Fusarium graminum, Fusarium heterosporum, Fusarium negundi, Fusarium oxysporum, Fusarium reticulatum, Fusarium roseum, Fusarium sambucinum, Fusarium sarcochroum, Fusarium sporotrichioides, Fusarium sulphureum, Fusarium torulosum, Fusarium trichothecioides, Fusarium venenatum, Bjerkandera adusta, Ceriporiopsis aneirina, Ceriporiopsis aneirina, Ceriporiopsis caregiea, Ceriporiopsis gilvescens, Ceriporiopsis pannocinta, Ceriporiopsis rivulosa, Ceriporiopsis subrufa, Ceriporiopsis subvermispora, Coprinus cinereus, Coriolus hirsutus, Humicola insolens, Humicola lanuginosa, Mucor miehei, Myceliophthora thermophila, Neurospora crassa, Neurospora intermedia, Penicillium purpurogenum, Penicillium canescens, Penicillium solitum, Penicillium funiculosum, Phanerochaete chrysosporium, Phlebia radiate, Pleurotus eryngii, Talaromyces flavus, Thielavia terrestris, Trametes villosa, Trametes versicolor, Trichoderma harzianum, Trichoderma koningii, Trichoderma longibrachiatum, Trichoderma reesei, and Trichoderma viride.

[0086] The engineered host cells can be cultured in conventional nutrient media modified as appropriate for activating promoters, selecting transformants, or amplifying the nucleic acid sequence encoding the variant β-glucosidase polypeptide. Culture conditions, such as temperature, pH and the like, are those previously used with the host cell selected for expression, and will be apparent to those skilled in the art. As noted, many references are available for the culture and production of many cells, including cells of bacterial and fungal origin. Cell culture media in general are set forth in Atlas and Parks (eds.), 1993, The Handbook of Microbiological Media, CRC Press, Boca Raton, Fla., which is incorporated herein by reference. For recombinant expression in filamentous fungal cells, the cells are cultured in a standard medium containing physiological salts and nutrients, such as described in Pourquie et al., 1988, Biochemistry and Genetics of Cellulose Degradation, eds. Aubert, et al., Academic Press, pp. 71-86; and Ilmen et al., 1997, Appl. Environ. Microbiol. 63:1298-1306. Culture conditions are also standard, e.g., cultures are incubated at 28° C. in shaker cultures or fermenters until desired levels of variant β-glucosidase expression are achieved. Preferred culture conditions for a given filamentous fungus may be found in the scientific literature and/or from the source of the fungi such as the American Type Culture Collection (ATCC). After fungal growth has been established, the cells are exposed to conditions effective to cause or permit the expression of a variant β-glucosidase.

[0087] In cases where a variant β-glucosidase coding sequence is under the control of an inducible promoter, the inducing agent, e.g., a sugar, metal salt or antibiotics, is added to the medium at a concentration effective to induce variant β-glucosidase expression.

[0088] In one embodiment, the recombinant cell is an Aspergillus niger, which is a useful strain for obtaining overexpressed polypeptide. For example A. niger var. awamori dgr246 is known to product elevated amounts of secreted cellulases (Goedegebuur et al., 2002, Curr. Genet. 41:89-98). Other strains of Aspergillus niger var awamori such as GCDAP3, GCDAP4 and GAP3-4 are known (Ward et al., 1993, Appl. Microbiol. Biotechnol. 39:738-743).

[0089] In another embodiment, the recombinant cell is a Trichoderma reesei, which is a useful strain for obtaining overexpressed polypeptide. For example, RL-P37, described by Sheir-Neiss et al., 1984, Appl. Microbiol. Biotechnol. 20:46-53, is known to secrete elevated amounts of cellulase enzymes. Functional equivalents of RL-P37 include Trichoderma reesei strain RUT-C30 (ATCC No. 56765) and strain QM9414 (ATCC No. 26921). It is contemplated that these strains would also be useful in overexpressing variant β-glucosidase polypeptides.

[0090] Cells expressing the variant β-glucosidase polypeptides of the disclosure can be grown under batch, fed-batch or continuous fermentations conditions. Classical batch fermentation is a closed system, wherein the compositions of the medium is set at the beginning of the fermentation and is not subject to artificial alternations during the fermentation. A variation of the batch system is a fed-batch fermentation in which the substrate is added in increments as the fermentation progresses. Fed-batch systems are useful when catabolite repression is likely to inhibit the metabolism of the cells and where it is desirable to have limited amounts of substrate in the medium. Batch and fed-batch fermentations are common and well known in the art. Continuous fermentation is an open system where a defined fermentation medium is added continuously to a bioreactor and an equal amount of conditioned medium is removed simultaneously for processing. Continuous fermentation generally maintains the cultures at a constant high density where cells are primarily in log phase growth. Continuous fermentation systems strive to maintain steady state growth conditions. Methods for modulating nutrients and growth factors for continuous fermentation processes as well as techniques for maximizing the rate of product formation are well known in the art of industrial microbiology.

[0091] 1.3.2. Recombinant Expression in Plants

[0092] The disclosure provides transgenic plants and seeds that recombinantly express a variant β-glucosidase polypeptide. The disclosure also provides plant products, e.g., oils, seeds, leaves, extracts and the like, comprising a variant β-glucosidase polypeptide.

[0093] The transgenic plant can be dicotyledonous (a dicot) or monocotyledonous (a monocot). The disclosure also provides methods of making and using these transgenic plants and seeds. The transgenic plant or plant cell expressing a variant β-glucosidase can be constructed in accordance with any method known in the art. See, for example, U.S. Pat. No. 6,309,872. T. reesei β-glucosidase has been successfully expressed in transgenic tobacco (Nicotiana tabaccum) and potato (Solanum tuberosum). See Hooker et al., 2000, in Glycosyl Hydrolases for Biomass Conversion, ACS Symposium Series, Vol. 769, Chapter 4, pp. 55-90.

[0094] In a particular aspect, the present disclosure provides for the expression of β-glucosidase variants in transgenic plants or plant organs and methods for the production thereof. DNA expression constructs are provided for the transformation of plants with a nucleic acid encoding the variant β-glucosidase polypeptide, preferably under the control of regulatory sequences which are capable of directing expression of the variant β-glucosidase polypeptide. These regulatory sequences include sequences capable of directing transcription in plants, either constitutively, or in stage and/or tissue specific manners.

[0095] The expression of variant β-glucosidase polypeptides in plants can be achieved by a variety of means. Specifically, for example, technologies are available for transforming a large number of plant species, including dicotyledonous species (e.g., tobacco, potato, tomato, Petunia, Brassica) and monocot species. Additionally, for example, strategies for the expression of foreign genes in plants are available. Additionally still, regulatory sequences from plant genes have been identified that are serviceable for the construction of chimeric genes that can be functionally expressed in plants and in plant cells (e.g., Klee, 1987, Ann. Rev. of Plant Phys. 38:467-486; Clark et al., 1990, Virology 179(2):640-7; Smith et al., 1990, Mol. Gen. Genet. 224(3):477-81.

[0096] The introduction of nucleic acids into plants can be achieved using several technologies including transformation with Agrobacterium tumefaciens or Agrobacterium rhizogenes. Non-limiting examples of plant tissues that can be transformed include protoplasts, microspores or pollen, and explants such as leaves, stems, roots, hypocotyls, and cotyls. Furthermore, DNA encoding a variant β-glucosidase can be introduced directly into protoplasts and plant cells or tissues by microinjection, electroporation, particle bombardment, and direct DNA uptake.

[0097] Variant β-glucosidase polypeptides can be produced in plants by a variety of expression systems. For instance, the use of a constitutive promoter such as the 35S promoter of Cauliflower Mosaic Virus (Guilley et al., 1982, Cell 30:763-73) is serviceable for the accumulation of the expressed protein in virtually all organs of the transgenic plant. Alternatively, promoters that are tissue-specific and/or stage-specific can be used (Higgins, 1984, Annu. Rev. Plant Physiol. 35:191-221; Shotwell and Larkins, 1989, In: The Biochemistry of Plants Vol. 15 (Academic Press, San Diego: Stumpf and Conn, eds.), p. 297), permit expression of variant β-glucosidase polypeptides in a target tissue and/or during a desired stage of development.

[0098] A recombinant cell of the disclosure can be engineered to express, in addition to a β-glucosidase polypeptide of the disclosure, one or more cellulase and/or other proteins useful in a cellulotyic reaction, for example a hemicellulase or an accessory polypeptide, optionally in secreted form. Cellulases are known in the art as enzymes that hydrolyze cellulose (β-1,4-glucan or β-D-glucosidic linkages) resulting in the formation of glucose, cellobiose, cellooligosaccharides, and the like. Hemicellulases are enzymes that hydrolyze hemicellulose (a branched polymer of D-xylose linked by β-1,4-glucosyl linkages, arabinose and other attached sugars) and other substrates to their constituent sugars. Accessory polypeptides are present in cellulase preparations that aid in the enzymatic digestion of cellulose. Thus, such recombinant cells can be advantageously used to produce cellulase compositions, as described in 4.4 below.

[0099] Cellulase enzymes have been traditionally divided into three major classes: endoglucanases (“EG”), exoglucanases or cellobiohydrolases (“CBH”) and β-glucosidases (“BG”) (Knowles et al., 1987, TIBTECH 5:255-261; Schulein, 1988, Methods in Enzymology 160(25):234-243).

[0100] Endoglucanases:

[0101] Endoglucanases break internal bonds and disrupt the crystalline structure of cellulose, exposing individual cellulose polysaccharide chains (“glucans”). Endoglucanases include polypeptides classified as Enzyme Commission no. (“EC”) 3.2.1.4) or which are capable of catalyzing the endohydrolysis of 1,4-β-D-glucosidic linkages in cellulose, lichenin or cereal β-D-glucans. Enzyme Commission numbering is a numerical classification scheme for enzymes.

[0102] Examples of suitable bacterial endoglucanases include, but are not limited to, Acidothermus cellulolyticus endoglucanase (WO 91/05039; WO 93/15186; U.S. Pat. No. 5,275,944; WO 96/02551; U.S. Pat. No. 5,536,655, WO 00/70031, WO 05/093050); Thermobifida fusca endoglucanase III (WO 05/093050); and Thermobifida fusca endoglucanase V (WO 05/093050).

[0103] Examples of suitable fungal endoglucanases include, but are not limited to, Trichoderma reesei endoglucanase I (Penttila et al., 1986, Gene 45: 253-263; GenBank accession no. M15665); Trichoderma reesei endoglucanase II (Saloheimo et al., 1988, Gene 63:11-22; GenBank accession no. M19373); Trichoderma reesei endoglucanase III (Okada et al., 1988, Appl. Environ. Microbiol. 64: 555-563; GenBank accession no. AB003694); Trichoderma reesei endoglucanase IV (Saloheimo et al., 1997, Eur. J. Biochem. 249: 584-591; GenBank accession no. Y11113); and Trichoderma reesei endoglucanase V (Saloheimo et al., 1994, Molecular Microbiology 13: 219-228; GenBank accession no. Z33381); Aspergillus aculeatus endoglucanase (Ooi et al., 1990, Nucleic Acids Research 18: 5884); Aspergillus kawachii endoglucanase (Sakamoto et al., 1995, Current Genetics 27: 435-439); Chrysosporium sp. C1 endoglucanase (U.S. Pat. No. 6,573,086; GenPept accession no. AAQ38150); Corynascus heterothallicus endoglucanase (U.S. Pat. No. 6,855,531; GenPept accession no. AAY00844); Erwinia carotovara endoglucanase (Saarilahti et al., 1990, Gene 90: 9-14); Fusarium oxysporum endoglucanase (GenBank accession no. L29381); Humicola grisea var. thermoidea endoglucanase (GenBank accession no. AB003107); Melanocarpus albomyces endoglucanase (GenBank accession no. MAL515703); Neurospora crassa endoglucanase (GenBank accession no. XM.sub.—324477); Piromyces equi endoglucanase (Eberhardt et al., 2000, Microbiology 146: 1999-2008; GenPept accession no. CAB92325); Rhizopus oryzae endoglucanase (Moriya et al., 2003, J. Bacteriology 185: 1749-1756; GenBank accession nos. AB047927, AB056667, and AB056668); and Thielavia terrestris endoglucanase (WO 2004/053039; EMBL accession no. CQ827970).

[0104] Cellobiohydrolases:

[0105] Cellobiohydrolases incrementally shorten the glucan molecules, releasing mainly cellobiose units (a water-soluble β-1,4-linked dimer of glucose) as well as glucose, cellotriose, and cellotetraose. Cellobiohydrolases include polypeptides classified as EC 3.2.1.91 or which are capable of catalyzing the hydrolysis of 1,4-β-D-glucosidic linkages in cellulose or cellotetraose, releasing cellobiose from the ends of the chains. Exemplary cellobiohydrolases include Trichoderma reesei cellobiohydrolase I (CEL7A) (Shoemaker et al., 1983, Biotechnology (N.Y.) 1: 691-696); Trichoderma reesei cellobiohydrolase II (CEL6A) (Teen et al., 1987, Gene 51: 43-52); Chrysosporium lucknowense CEL7 cellobiohydrolase (WO 2001/79507); Myceliophthora thermophila CEL7 (WO 2003/000941); and Thielavia terrestris cellobiohydrolase (WO 2006/074435).

[0106] β-Glucosidases:

[0107] β-Glucosidases split cellobiose into glucose monomers. β-glucosidases include polypeptides classified as EC 3.2.1.21 or which are capable of catalyzing the hydrolysis of terminal, non-reducing β-D-glucose residues with release of β-D-glucose. Exemplary β-glucosidases can be obtained from Cochliobolus heterostrophus (SEQ ID NO:34), Aspergillus oryzae (WO 2002/095014), Aspergillus fumigatus (WO 2005/047499), Penicillium brasilianum (e.g., Penicillium brasilianum strain IBT 20888) (WO 2007/019442), Aspergillus niger (Dan et al., 2000, J. Biol. Chem. 275: 4973-4980), Aspergillus aculeatus (Kawaguchi et al., 1996, Gene 173: 287-288), Penicillium funiculosum (WO 2004/078919), S. pombe (Wood et al., 2002, Nature 415: 871-880), T. reesei (e.g., β-glucosidase 1 (U.S. Pat. No. 6,022,725), β-glucosidase 3 (U.S. Pat. No. 6,982,159), β-glucosidase 4 (U.S. Pat. No. 7,045,332), β-glucosidase 5 (U.S. Pat. No. 7,005,289), β-glucosidase 6 (U.S. Publication No. 20060258554), or β-glucosidase 7 (U.S. Publication No. 20060258554)).

[0108] Hemicellulases:

[0109] The recombinantly expressed hemicellulase can be any class of hemicellulase, including an endoxylanase, a β-xylosidase, an α-L-arabionofuranosidase, an α-D-glucuronidase, an acetyl xylan esterase, a feruloyl esterase, a coumaroyl esterase, an α-galactosidase, a α-galactosidase, a β-mannanase or a β-mannosidase.

[0110] Endoxylanases include any polypeptide classified EC 3.2.1.8 or which is capable of catalyzing the endohydrolysis of 1,4-β-D-xylosidic linkages in xylans. Endoxylanases also include polypeptides classified as EC 3.2.1.136 or which are capable of hydrolyzing 1,4 xylosidic linkages in glucuronoarabinoxylans.

[0111] β-xylosidases include any polypeptide classified as EC 3.2.1.37 or which is capable of catalyzing the hydrolysis of 1,4-β-D-xylans to remove successive D-xylose residues from the non-reducing termini. β-xylosidases may also hydrolyze xylobiose.

[0112] α-L-arabinofuranosidases include any polypeptide classified as EC 3.2.1.55 or which is capable of acting on α-L-arabinofuranosides, α-L-arabinans containing (1,2) and/or (1,3)- and/or (1,5)-linkages, arabinoxylans or arabinogalactans.

[0113] α-D-glucuronidases include any polypeptide classified as EC 3.2.1.139 or which is capable of catalyzing a reaction of the following form: α-D-glucuronoside+H(2)O=an alcohol+D-glucuronate. α-D-glucuronidases may also hydrolyse 4-O-methylated glucoronic acid, which can also be present as a substituent in xylans. α-D-glucuronidases also include polypeptides classified as EC 3.2.1.131 or which are capable of catalying the hydrolysis of α-1,2-(4-O-methyl)glucuronosyl links.

[0114] Acetyl xylan esterases include any polypeptide classified as EC 3.1.1.72 or which is capable of catalyzing the deacetylation of xylans and xylo-oligosaccharides. Acetyl xylan esterases may catalyze the hydrolysis of acetyl groups from polymeric xylan, acetylated xylose, acetylated glucose, α-napthyl acetate or p-nitrophenyl acetate but, typically, not from triacetylglycerol. Acetyl xylan esterases typically do not act on acetylated mannan or pectin.

[0115] Feruloyl esterases include any polypeptide classified as EC 3.1.1.73 or which is capable of catalyzing a reaction of the form: feruloyl-saccharide+H(2)O=ferulate+saccharide. The saccharide may be, for example, an oligosaccharide or a polysaccharide. A feruloyl esterase may catalyze the hydrolysis of the 4-hydroxy-3-methoxycinnamoyl (feruloyl) group from an esterified sugar, which is usually arabinose in natural substrates, while p-nitrophenol acetate and methyl ferulate are typically poorer substrates. Feruloyl esterase are sometimes considered hemicellulase accessory enzymes, since they may help xylanases and pectinases to break down plant cell wall hemicellulose and pectin.

[0116] Coumaroyl esterases include any polypeptide classified as EC 3.1.1.73 or which is capable of catalyzing a reaction of the form: coumaroyl-saccharide+H(2)O=coumarate+saccharide. The saccharide may be, for example, an oligosaccharide or a polysaccharide. Because some coumaroyl esterases are classified as EC 3.1.1.73 they may also be referred to as feruloyl esterases.

[0117] α-galactosidases include any polypeptide classified as EC 3.2.1.22 or which is capable of catalyzing the hydrolysis of of terminal, non-reducing α-D-galactose residues in α-D-galactosides, including galactose oligosaccharides, galactomannans, galactans and arabinogalactans. α-galactosidases may also be capable of hydrolyzing α-D-fucosides.

[0118] β-galactosidases include any polypeptide classified as EC 3.2.1.23 or which is capable of catalyzing the hydrolysis of terminal non-reducing β-D-galactose residues in β-D-galactosides. β-galactosidases may also be capable of hydrolyzing α-L-arabinosides.

[0119] β-mannanases include any polypeptide classified as EC 3.2.1.78 or which is capable of catalyzing the random hydrolysis of 1,4-β-D-mannosidic linkages in mannans, galactomannans and glucomannans.

[0120] β-mannosidases include any polypeptide classified as EC 3.2.1.25 or which is capable of catalyzing the hydrolysis of terminal, non-reducing β-D-mannose residues in β-D-mannosides.

[0121] Suitable hemicellulases include T. reesei α-arabinofuranosidase I (ABF1), α-arabinofuranosidase I1 (ABF2), α-arabinofuranosidase III (ABF3), α-galactosidase I (AGL1), α-galactosidase I1 (AGL2), α-galactosidase III (AGL3), acetyl xylan esterase I (AXE1), acetyl xylan esterase III (AXE3), endoglucanase V1 (EG6), endoglucanase VIII (EG8), α-glucuronidase I (GLR1), β-mannanase (MAN1), polygalacturonase (PEC2), xylanase I (XYN1), xylanase I1 (XYN2), xylanase III (XYN3), and β-xylosidase (BXL1).

[0122] Accessory Polypeptides:

[0123] Accessory polypeptides are present in cellulase preparations that aid in the enzymatic digestion of cellulose (see, e.g., WO 2009/026722 and Harris et al., 2010, Biochemistry, 49:3305-3316). In some embodiments, the accessory polypeptide is an expansin or swollenin-like protein. Expansins are implicated in loosening of the cell wall structure during plant cell growth (see, e.g., Salheimo et al., 2002, Eur. J. Biochem., 269:4202-4211). Expansins have been proposed to disrupt hydrogen bonding between cellulose and other cell wall polysaccharides without having hydrolytic activity. In this way, they are thought to allow the sliding of cellulose fibers and enlargement of the cell wall. Swollenin, an expansin-like protein, contains an N-terminal Carbohydrate Binding Module Family 1 domain (CBD) and a C-terminal expansin-like domain. In some embodiments, an expansin-like protein and/or swollenin-like protein comprises one or both of such domains and/or disrupts the structure of cell walls (e.g., disrupting cellulose structure), optionally without producing detectable amounts of reducing sugars. Other types of accessory proteins include cellulose integrating proteins, scaffoldins and/or a scaffoldin-like proteins (e.g., CipA or CipC from Clostridium thermocellum or Clostridium cellulolyticum respectively). Other exemplary accessory proteins are cellulose induced proteins and/or modulating proteins (e.g., as encoded by cip1 or cip2 gene and/or similar genes from Trichoderma reesei; see e.g., Foreman et al., 2003, J. Biol. Chem., 278:31988-31997.

[0124] 1.4. Compositions of Variant β-Glucosidase Polypeptides

[0125] In general, a variant β-glucosidase polypeptide produced in cell culture is secreted into the medium and may be purified or isolated, e.g., by removing unwanted components from the cell culture medium. However, in some cases, a variant β-glucosidase polypeptide may be produced in a cellular form necessitating recovery from a cell lysate. In such cases the variant β-glucosidase polypeptide is purified from the cells in which it was produced using techniques routinely employed by those of skill in the art. Examples include, but are not limited to, affinity chromatography (Van Tilbeurgh et al., 1984, FEBS Lett. 169(2):215-218), ion-exchange chromatographic methods (Goyal et al., 1991, Bioresource Technology, 36:37-50; Fliess et al., 1983, Eur. J. Appl. Microbiol. Biotechnol. 17:314-318; Bhikhabhai et al., 1984, J. Appl. Biochem. 6:336-345; Ellouz et al., 1987, Journal of Chromatography, 396:307-317), including ion-exchange using materials with high resolution power (Medve et al., 1998, J. Chromatography A, 808:153-165), hydrophobic interaction chromatography (Tomaz and Queiroz, 1999, J. Chromatography A, 865:123-128), and two-phase partitioning (Brumbauer et al., 1999, Bioseparation 7:287-295).

[0126] The variant β-glucosidase polypeptides of the disclosure are suitably used in cellulase compositions. Cellulases are known in the art as enzymes that hydrolyze cellulose (beta-1,4-glucan or beta D-glucosidic linkages) resulting in the formation of glucose, cellobiose, cellooligosaccharides, and the like. Cellulase enzymes have been traditionally divided into three major classes: endoglucanases (“EG”), exoglucanases or cellobiohydrolases (EC 3.2.1.91) (“CBH”) and β-glucosidases (EC 3.2.1.21) (“BG”) (Knowles et al., 1987, TIBTECH 5:255-261; Schulein, 1988, Methods in Enzymology 160(25):234-243).

[0127] Certain fungi produce complete cellulase systems which include exo-cellobiohydrolases or CBH-type cellulases, endoglucanases or EG-type cellulases and β-glucosidases or BG-type cellulases (Schulein, 1988, Methods in Enzymology 160(25):234-243). Such cellulase compositions are referred to herein as “whole” cellulases.

[0128] The cellulase compositions of the disclosure typically include, in addition to a variant β-glucosidase polypeptide, one or more cellobiohydrolases and/or endoglucanases and, optionally, one or more β-glucosidases other than the variant β-glucosidase polypeptides of the disclosure can be included. In their crudest form, cellulase compositions contain the microorganism culture that produced the enzyme components. “Cellulase compositions” also refers to a crude fermentation product of the microorganisms. A crude fermentation is preferably a fermentation broth that has been separated from the microorganism cells and/or cellular debris (e.g., by centrifugation and/or filtration). In some cases, the enzymes in the broth can be optionally diluted, concentrated, partially purified or purified and/or dried. The variant β-glucosidase polypeptide can be co-expressed with one or more of the other components of the cellulase composition or it can be expressed separately, optionally purified and combined with a composition comprising one or more of the other cellulase components.

[0129] When employed in cellulase compositions, the variant β-glucosidase is generally present in an amount sufficient to allow release of soluble sugars from the biomass. The amount of variant β-glucosidase enzymes added depends upon the type of biomass to be saccharified which can be readily determined by the skilled artisan. In certain embodiments, the weight percent of variant β-glucosidase polypeptide is suitably at least 1, at least 5, at least 10, or at least 20 weight percent of the total polypeptides in a cellulase composition. Exemplary cellulase compositions include a variant β-glucosidase of the disclosure in an amount ranging from about 1 to about 5 weight percent, from about 1 to about 10 weight percent, from about 1 to about 15 weight percent, from about 1 to about 20 weight percent, from about 1 to about 25 weight percent, from about 5 to about 10 weight percent, from about 5 to about 15 weight percent, from about 5 to about 20 weight percent, from about 5 to about 25 weight percent, from about 5 to about 30 weight percent, from about 5 to about 35 weight percent, from about 5 to about 40 weight percent, from about 5 to about 45 weight percent, from about 5 to about 50 weight percent, from about 10 to about 20 weight percent, from about 10 to about 25 weight percent, from about 10 to about 30 weight percent, from about 10 to about 35 weight percent, from about 10 to about 40 weight percent, from about 10 to about 45 weight percent, from about 10 to about 50 weight percent, from about 15 to about 20 weight percent, from about 15 to about 25 weight percent, from about 15 to about 30 weight percent, or from about 15 to about 35 weight percent of the total polypeptides in the composition.

[0130] 1.5. Utility of Variant β-Glucosidase Polypeptides

[0131] It can be appreciated that the variant β-glucosidase polypeptides of the disclosure and compositions comprising the variant β-glucosidase polypeptides find utility in a wide variety of applications, for example in detergent compositions that exhibit enhanced cleaning ability, function as a softening agent and/or improve the feel of cotton fabrics (e.g., “stone washing” or “biopolishing”), or in cellulase compositions for degrading wood pulp into sugars (e.g., for biofuel production). Other applications include the treatment of mechanical pulp (Pere et al., 1996, Tappi Pulping Conference, pp. 693-696 (Nashville, Tenn., Oct. 27-31, 1996)), for use as a feed additive (see, e.g., WO 91/04673) and in grain wet milling.

[0132] 1.5.1. Saccharification Reactions

[0133] Biofuels such as ethanol can be produced via saccharification and fermentation processes from cellulosic biomass such as trees, herbaceous plants, municipal solid waste and agricultural and forestry residues. However, the ratio of individual cellulase enzymes within a naturally occurring cellulase mixture produced by a microbe may not be the most efficient for rapid conversion of cellulose in biomass to glucose. The use of optimized β-glucosidase activity may greatly enhance the production of ethanol.

[0134] Cellulase compositions comprising one or more of the variant β-glucosidase polypeptides of the disclosure can be used in saccharification reaction to produce simple sugars for fermentation. Accordingly, the present disclosure provides methods for saccharification comprising contacting biomass with a cellulase composition comprising a variant β-glucosidase polypeptide of the disclosure and, optionally, subjecting the resulting sugars to fermentation by a microorganism.

[0135] The term “biomass,” as used herein, refers to any composition comprising cellulose (optionally also hemicellulose and/or lignin). As used herein, biomass includes, without limitation, seeds, grains, tubers, plant waste or byproducts of food processing or industrial processing (e.g., stalks), corn (including, e.g., cobs, stover, and the like), grasses (including, e.g., Indian grass, such as Sorghastrum nutans; or, switchgrass, e.g., Panicum species, such as Panicum virgatum), wood (including, e.g., wood chips, processing waste), paper, pulp, and recycled paper (including, e.g., newspaper, printer paper, and the like). Other biomass materials include, without limitation, potatoes, soybean (e.g., rapeseed), barley, rye, oats, wheat, beets, and sugar cane bagasse.

[0136] The saccharified biomass (e.g., lignocellulosic material processed by enzymes of the disclosure) can be made into a number of bio-based products, via processes such as, e.g., microbial fermentation and/or chemical synthesis. As used herein, “microbial fermentation” refers to a process of growing and harvesting fermenting microorganisms under suitable conditions. The fermenting microorganism can be any microorganism suitable for use in a desired fermentation process for the production of bio-based products. Suitable fermenting microorganisms include, without limitation, filamentous fungi, yeast, and bacteria. The saccharified biomass can, for example, be made it into a fuel (e.g., a biofuel such as a bioethanol, biobutanol, biomethanol, a biopropanol, a biodiesel, a jet fuel, or the like) via fermentation and/or chemical synthesis. The saccharified biomass can, for example, also be made into a commodity chemical (e.g., ascorbic acid, isoprene, 1,3-propanediol), lipids, amino acids, polypeptides, and enzymes, via fermentation and/or chemical synthesis.

[0137] Thus, in certain aspects, the variant β-glucosidase polypeptides of the disclosure find utility in the generation of ethanol from biomass in either separate or simultaneous saccharification and fermentation processes. Separate saccharification and fermentation is a process whereby cellulose present in biomass is saccharified into simple sugars (e.g., glucose) and the simple sugars subsequently fermented by microorganisms (e.g., yeast) into ethanol. Simultaneous saccharification and fermentation is a process whereby cellulose present in biomass is saccharified into simple sugars (e.g., glucose) and, at the same time and in the same reactor, microorganisms (e.g., yeast) ferment the simple sugars into ethanol.

[0138] Prior to saccharification, biomass is preferably subject to one or more pretreatment step(s) in order to render cellulose material more accessible or susceptible to enzymes and thus more amenable to hydrolysis by the variant β-glucosidase polypeptides of the disclosure.

[0139] 1.5.2. Detergent Compositions

[0140] The present disclosure also provides detergent compositions comprising a variant β-glucosidase polypeptide of the disclosure. The detergent compositions may employ besides the variant β-glucosidase polypeptide one or more of a surfactant, including anionic, non-ionic and ampholytic surfactants; a hydrolase; a bleaching agents; a bluing agent; a caking inhibitors; a solubilizer; and a cationic surfactant. All of these components are known in the detergent art.

[0141] The variant β-glucosidase polypeptide is preferably provided as part of cellulase composition. The cellulase composition can be employed from about 0.00005 weight percent to about 5 weight percent or from about 0.0002 weight percent to about 2 weight percent of the total detergent composition. The cellulase composition can be in the form of a liquid diluent, granule, emulsion, gel, paste, and the like. Such forms are known to the skilled artisan. When a solid detergent composition is employed, the cellulase composition is preferably formulated as granules.

### EXAMPLES

### Example 1

### Selecting a Lead β-Glucosidase for Thermotolerance Evolution

[0142] Identification of a lead β-glucosidase enzyme for evolution for thermotolerance was carried out utilizing an internal collection of β-glucosidase enzymes identified by either sequence homology to known β-glucosidases, or by the demonstration of activity on cellobiose or other substrates using known methods. The two β-glucosidase enzymes that were selected for further screening are given by SEQ ID NO:378 and SEQ ID NO:379.

### Expression of β-Glucosidase Candidate Enzymes

[0143] FIG. 1 shows a map of a modified expression vector that was used to produce C-terminally His-tagged constructs for screening. 188 β-glucosidase candidate enzymes were evaluated for activity and thermotolerance at 60° C. E. coli strains expressing the 188 β-glucosidase candidates were picked from glycerol stocks and inoculated into 96-well plates, containing 60 μl LB-carb media comprising about 10 g tryptone, 5 g yeast extract, and 10 g sodium chloride per liter, pH 7.0, with 100 mg/L final concentration of carbenicillin (Sigma, St. Louis, Mo., catalog# C3416). The plates were incubated to allow for growth overnight at about 37° C. The plates were replicated into two separate 384-well plates containing 60 μl LB-carb. One plate was used for activity screening (designated the induction plate) while the other contained about 20 μl of a 60% glycerol-water solution (designated the Gly-stock plate). The Gly-stock plates were then stored at minus 80° C., and were used as the source of inoculum for further testing. The induction plates were grown overnight at about 37° C. Expression of the polypeptide was induced with isopropyl β-D-1-thiogalactopyranoside (IPTG, Invitrogen, Carlsbad, Calif., catalog#15529-019) at about 0.5 mM final concentration, and grown overnight at 30° C.

### Preparation of Lysates Containing β-Glucosidase Candidate Enzymes

[0144] The next day following overnight induction of polypeptide expression, cultures were lysed with the addition of about 5 μl of a solution containing about 16 U/ml Benzonase™ (Sigma, St. Louis, Mo., catalog# E1014) and about 3.2 mg/ml Lysozyme (Sigma, St. Louis, Mo., catalog# L6876). The cultures were then subjected to one freeze/thaw cycle at about −80° C. to promote lysis. Lysates were collected for the subsequent β-glucosidase characterizations.

### β-Glucosidase Activity Assay at Various Temperatures

[0145] Total protein concentrations of the β-glucosidase lysates samples were measured using the commercial Bio-Rad Protein Assay Dye Reagent Concentrate (Bio-Rad, cat#500-0006, Hercules Calif.). Prior to determination of β-glucosidase activity, two 50 μl aliquots of each lysate were pre-incubated at either 37° C. or 60° C., for 30 minutes. After pre-incubation, β-glucosidase activity was measured using the fluorogenic substrate 4-methylumbelliferyl β-D-glucopyranoside (MUG), (Sigma, St. Louis, Mo., catalog# M3633) in an assay referred to herein as the “MUG assay”. Assays were performed at 37° C., in Costar™ 96-well black bottom plates (Corning Inc., Corning, N.Y., Catalog No. 3631). Wells each contained about 10 μl of lysate and about 40 μl of reaction buffer (50 mM sodium citrate, pH 5.5). Reactions were initiated by the addition of 50 μl MUG (500 μM dissolved in reaction buffer) to a final concentration of about 250 μM. Plates were read using a Spectramax plate reader set at excitation and emission wavelengths of 365 nm and 450 nm respectively, using the kinetic read mode. The linear portion of the kinetic read was used to determine the activity. One unit of activity is defined herein as the liberation of 1.0 μmol of 4-methylumbelliferone (MU) from MUG substrate per minute at around pH 5.5 at about 37° C.

[0146] A subset of β-glucosidase candidates was tested for thermotolerance after 30 minute thermal challenges at each of about 60, 70, and 80° C. β-glucosidase activity was then measured using the MUG assay as described herein. To obtain specific activities the approximate concentration of β-glucosidase candidate enzymes was estimated by densitometry of SDS-PAGE gels. The specific activity is represented as units of activity per mg of estimated β-glucosidase enzyme. The results of the thermotolerance test are presented in Table 2. Based on these results, two β-glucosidase candidates having sequences given by SEQ ID NO:378 and SEQ ID NO:379 were selected for evolution using GSSM™ as described in Example 2 below.

TABLE 2

| | Protein | | | | % re- | % re- | % re- |
|---|---|---|---|---|---|---|---|
| | Conc | Protein | Purity | Specific | sidual | sidual | sidual |
| SEQ | Stock | (mg in | (approx- | Activity | (60° | (70° | (80° |
| ID | (mg/ml) | rxn) | imate) | (U/mg) | C.) | C.) | C.) |
| 379 | 0.04 | 0.00004 | 14.0% | 187.4 | 27% | 0% | 1% |
| 378 | 0.25 | 0.00025 | 7.5% | 49.5 | 97% | 1% | 1% |

### Example 2

### Gene Site Saturation Mutagenesis (GSSM™) Library Construction and Screening

[0147] A selected β-glucosidase polypeptide (SEQ ID NO:379) was tagged with hexahistidine (6×-His) to facilitate characterization of thermotolerant mutants discovered. Briefly, by using an site-directed mutagenesis (SDM) approach, primers were designed for the purpose of removing the TAA stop codon from the parent BG gene sequence (SEQ ID NO:198), using sequence 20 nucleotides upstream and downstream of the TAA stop codon. Removal of the stop codon allowed translation of the hexahistidine region contained in the pSE420-C-His expression vector (See FIG. 1). The SDM product was then treated with Dpn I enzyme for 4 hours and transformed into One Shot TOP 10 competent cells (Invitrogen, Carlsbad Calif.). Transformants were selected from colonies plated on LB-carb plates, overnight at about 37° C. Plasmids were purified, and BG gene sequences verified using an ABI 3730x1 DNA Analyzer and ABI BigDye® v3.1 cycle sequencing chemistry. The plasmid containing the 6×-His-tagged β-glucosidase polypeptide (SEQ ID NO:380) was mini-prepped, purified, and transformed into a XL1-Blue Competent Cells (200249, Stratagene, La Jolla Calif.). Activity of the expressed β-glucosidase polypeptide was verified using the MUG assay described in Example 1.

[0148] The 6×-His-tagged β-glucosidase-encoding gene (SEQ ID NO:380) was mutagenized via GSSM to make the “β-glucosidase GSSM Library.”

[0149] The GSSM method is described in U.S. Patent Pub. No. 2009/0220480, pp. 48-50, and was performed with particular modifications as described herein. The β-glucosidase GSSM library was constructed using a 32 codon NNK strategy and transformed into E. coli host XL1-Blue. In the NNK strategy, random peptides are produced by the use of random oligonucleotides for which the codons have the sequence NNK, where N is selected from G, A, T, C and K is selected from G or T.

[0150] To accomplish site-saturation mutagenesis every residue of a β-glucosidase enzyme was converted into all 20 amino acids by site directed mutagenesis using 32-fold degenerate oligonucleotide primers. A culture of the β-glucosidase expression construct was grown and a preparation of the plasmid was made. Primers were made to randomize each codon, where the primers have the common structure X₂₀NN(G/T)X₂₀. A reaction mix of 25 μl was prepared containing about 50 ng of plasmid template, 125 ng of each primer, native Pfu polymerase buffer, 200 μM each dNTP and 2.5 units of native Pfu DNA Polymerase. The reaction was cycled in a Perkin-Elmer 9700 thermocycler as follows: Initial denaturation at 95° C. for 3 min, 20 cycles of 95° C. for 45 sec, 50° C. for 45 sec, and 68° C. for 12 min. Final elongation step of 68° C. for 5 min. The reaction mix was digested with 10 units of DpnI at 37° C. for 1 hour to digest the methylated template DNA. 3 μl of each reaction mix were used to transform 50 μl of XL1-Blue cells and the entire transformation mix was plated on large LB-carb plates yielding 200-1000 colonies per plate.

[0151] Identification of thermotolerant mutants was carried out by evaluating residual activity using the MUG assay (described in Example 1) following a thermal challenge of 66° C. for 30 minutes. This temperature was selected due to the observation that approximately 5-10% residual activity of the wild-type parent BG (SEQ ID NO:379) remained after a 66° C. challenge (see FIG. 2).

[0152] GSSM colonies were grown at 37° C. for about 1 day. Colonies were inoculated into wells of a 384-well plate that contained about 60 μl of LB-carb to generate a master plate (MP). The MP was cultured overnight at 37° C., and was replicated by robotic-pintooling into two separate 384-well plates. One plate contained 60 μl LB-carb per well (designated the induction plate) and the other contained 80 μl LB-carb-10% glycerol for freezing stocks of the library (designated the stock plate). The stock plates were then stored at −80° C. Induction plates were cultured overnight at 37° C. Expression of mutagenized β-glucosidase polypeptides was induced by adding about 20 μl LB-carb containing about 2 mM IPTG and were cultured overnight at 30° C. Cultures were lysed as described previously in Example 1. Lysis plates were stored at −80° C. until assayed.

[0153] Lysis plates were centrifuged for about 30 minutes at about 4,000 rpm and about 20° C. About 5 μl aliquots of supernatant from the lysis plate were placed into wells of a new plate containing about 75 μl of reaction buffer (designated the dilution plate). To test the library for thermotolerance about 40 μl aliquots of lysate from the dilution plate were placed into wells of a new plate containing about 40 μl of reaction buffer which was heated to about 66° C. for about 30 minutes. About 10 μl of heat-treated lysate was removed and assayed for β-glucosidase activity as described in Example 1, with the modification that the reaction buffer contained 3 mM MUG, pH 5.5 (final volume of 80 μl). After incubation for about 4 minutes, the plates were read using a single read at the wavelengths given in Example 1. As a control, about 10 μl of unheated lysate from the dilution plate was assayed in parallel. Thermotolerant mutants were identified via residual activity (the amount of activity observed in samples after heating compared to activity in the un-heated sample of the same lysate), in comparison to activity of a control (SEQ ID NO:380). An example of the GSSM library screening plate results are presented in FIG. 3.

[0154] Putative thermotolerant mutants were re-confirmed by repeating the assay procedure above with mutants picked in triplicate and re-assayed for residual activity as described for GSSM screening, (see FIG. 4 for an example of triplicate re-assay data).

[0155] To further differentiate the mutants, additional plates containing GSSM mutants were challenged for 30 minutes at two temperatures, about 66° C. and 70° C. Residual activity for the mutants was determined using the method described in Example 1, and the data are displayed in Table 3 below. The asterisk (*) indicates a stop codon.

TABLE 3
Secondary Thermotolerance Screen of GSSM mutants: (Activity, Residual activity,
thermal challenges, at 66° C. and 70° C., at pH 5.5)

| | Activity | Activity | Activity | | | | |
|---|---|---|---|---|---|---|---|
| | (U/mg Protein) @ | (U/mg Protein), | (U/mg Protein), | % | % | | AA-mutations |
| SEQ | Ambient | (post 66° C. | (post 70° C. | Residual | Residual | AA | and position |
| ID | (~22 C.) | challenge) | challenge) | (66° C.) | (70° C.) | SEQID | (polypeptide) |
| 1 | 25.93 | 0.21 | 0.03 | 1% | 0% | 199 | A410R |
| 2 | 26.59 | 0.04 | −0.01 | 0% | 0% | 200 | A410T K451Q |
| 3 | 24.49 | 0.01 | −0.02 | 0% | 0% | 201, 380 | |
| 4 | 25.07 | 0.04 | 0.02 | 0% | 0% | 202 | A449* |
| 5 | 28.88 | 1.17 | 0.11 | 4% | 0% | 203 | A449C |
| 6 | 20.76 | 0.00 | 0.00 | 0% | 0% | 204 | A449D |
| 7 | 29.79 | 0.10 | 0.01 | 0% | 0% | 205 | A68F |
| 8 | 22.73 | 0.31 | −0.01 | 1% | 0% | 206 | A68W |
| 9 | 25.77 | 0.45 | 0.01 | 2% | 0% | 207 | A73G |
| 10 | 23.80 | 0.46 | 0.00 | 2% | 0% | 208 | A73S |
| 11 | 32.13 | 0.58 | 0.00 | 2% | 0% | 208 | A73S |
| 12 | 30.12 | 0.49 | 0.00 | 2% | 0% | 208 | A73S |
| 13 | 28.70 | 0.02 | 0.00 | 0% | 0% | 209 | D302S |
| 14 | 11.92 | 0.03 | 0.01 | 0% | 0% | 210 | D414S |
| 15 | 10.26 | 0.10 | 0.07 | 1% | 1% | 211 | D414T |
| 16 | 10.06 | 0.12 | 0.03 | 1% | 0% | 211 | D414T |
| 17 | 31.02 | 0.00 | −0.01 | 0% | 0% | 212 | D7G |
| 18 | 24.12 | 0.01 | −0.01 | 0% | 0% | 212 | D7G |
| 19 | 28.76 | 0.02 | −0.02 | 0% | 0% | 213 | D7H |
| 20 | 27.96 | 0.00 | −0.02 | 0% | 0% | 214 | E105G |
| 21 | 16.25 | 0.01 | 0.01 | 0% | 0% | 215 | E428D |
| 22 | 13.14 | −0.01 | 0.00 | 0% | 0% | 216 | E428I |
| 23 | 11.19 | 0.09 | 0.04 | 1% | 0% | 217 | E450C |
| 24 | 9.58 | 1.94 | 0.01 | 20% | 0% | 218 | F292I |
| 25 | 12.19 | 0.70 | 0.00 | 6% | 0% | 219 | F292V |
| 26 | 20.01 | 4.50 | 0.02 | 22% | 0% | 220 | T219A |
| 27 | 26.61 | 0.03 | −0.01 | 0% | 0% | 221 | A449E |
| 28 | 12.28 | 0.09 | −0.01 | 1% | 0% | 222 | H315F |
| 29 | 26.37 | 0.08 | 0.04 | 0% | 0% | 223 | H315I |
| 30 | 28.22 | 0.14 | 0.02 | 0% | 0% | 224 | H315K |
| 31 | 5.60 | 4.78 | 2.54 | 85% | 45% | 225 | I216V T219A |
| | | | | | | | M246K |
| 32 | 31.81 | 0.03 | 0.00 | 0% | 0% | 226 | I378L |
| 33 | 31.69 | 0.15 | 0.00 | 0% | 0% | 227 | I63V |
| 34 | 48.64 | 0.34 | −0.01 | 1% | 0% | 227 | I63V |
| 35 | 25.38 | 0.02 | 0.01 | 0% | 0% | 228 | K415A |
| 36 | 24.70 | 0.03 | 0.04 | 0% | 0% | 229 | K451D |
| 37 | 14.51 | 0.00 | 0.00 | 0% | 0% | 230 | K6V |
| 37 | 14.90 | 0.00 | −0.01 | 0% | 0% | 230 | K6V |
| 38 | 8.45 | 0.10 | 0.02 | 1% | 0% | 231 | L427G |
| 39 | 6.91 | 0.08 | −0.03 | 1% | 0% | 231 | L427G |
| 40 | 21.84 | 0.06 | 0.01 | 0% | 0% | 232 | L447F |
| 41 | 24.17 | 12.49 | 0.65 | 52% | 3% | 233 | M246H |
| 42 | 22.13 | 3.78 | 0.05 | 17% | 0% | 234 | M246K |
| 43 | 19.32 | 0.30 | 0.00 | 2% | 0% | 235 | M325T |
| 44 | 18.28 | 0.22 | 0.01 | 1% | 0% | 235 | M325T |
| 45 | 11.77 | 0.02 | 0.02 | 0% | 0% | 236 | N175S |
| 46 | 27.82 | 0.67 | 0.00 | 2% | 0% | 237 | N326G |
| 47 | 29.05 | 0.63 | 0.01 | 2% | 0% | 237 | N326G |
| 48 | 18.34 | 0.03 | 0.00 | 0% | 0% | 238 | N332E |
| 49 | 27.62 | 0.01 | −0.01 | 0% | 0% | 239 | Q139P |
| 50 | 19.56 | 0.01 | 0.02 | 0% | 0% | 240 | Q142K |
| 51 | 22.72 | 0.01 | 0.00 | 0% | 0% | 241 | Q366N |
| 52 | 22.81 | −0.03 | 0.01 | 0% | 0% | 242 | Q3E |
| 53 | 28.40 | 0.03 | 0.01 | 0% | 0% | 243 | Q3M |
| 54 | 23.42 | 0.00 | −0.01 | 0% | 0% | 244 | Q3R |
| 55 | 28.36 | −0.02 | −0.01 | 0% | 0% | 245 | R416T |
| 56 | 30.37 | 4.83 | 0.02 | 16% | 0% | 246 | S296T |
| 57 | 13.66 | 0.02 | −0.01 | 0% | 0% | 247 | S317K |
| 58 | 26.96 | 0.01 | 0.00 | 0% | 0% | 201 | |
| 59 | 16.53 | 0.00 | 0.01 | 0% | 0% | 248 | S402T |
| 60 | 14.94 | 3.27 | 0.02 | 22% | 0% | 220 | T219A |
| 61 | 21.14 | 3.89 | 0.01 | 18% | 0% | 220 | T219A |
| 62 | 13.19 | 1.91 | 0.01 | 14% | 0% | 249 | T219S |
| 63 | 27.10 | 0.00 | −0.01 | 0% | 0% | 250 | T24D |
| 64 | 20.15 | 0.02 | −0.01 | 0% | 0% | 251 | T24H |
| 65 | 25.71 | 0.04 | 0.00 | 0% | 0% | 252 | T297S |
| 66 | 28.04 | 0.79 | 0.01 | 3% | 0% | 253 | T441V |
| 67 | 33.52 | 0.47 | −0.01 | 1% | 0% | 253 | T441V |
| 68 | 26.04 | 0.45 | 0.02 | 2% | 0% | 254 | V167A K231E |
| 69 | 0.03 | −0.01 | 0.00 | −29% | −5% | 255 | V203P |
| 70 | 18.66 | −0.04 | −0.01 | 0% | 0% | 256 | V420L |
| 71 | 27.91 | 0.02 | −0.01 | 0% | 0% | 257 | V60R |
| 72 | 20.65 | 7.43 | 0.28 | 36% | 1% | 258 | W401F |
| 73 | 29.37 | 3.42 | 0.00 | 12% | 0% | 259 | Y399F |
| 74 | 13.74 | −0.02 | 0.00 | 0% | 0% | 201 | |
| 75 | 23.48 | 4.12 | 0.02 | 18% | 0% | 246 | S296T |
| 76 | 11.83 | 0.51 | −0.01 | 4% | 0% | 260 | Y74L |
| 198 | 26.48 | 0.01 | −0.01 | 0% | 0% | 380, 201 | Parent |

[0156] In a tertiary thermotolerance screen, a subset of the GSSM library mutants including V203P (SEQ ID NO:255), M246H (SEQ ID NO:233), and the triple mutant I216V-T219A-M246K (SEQ ID NO:225) were evaluated for residual MUG activity after increased thermal challenges (66, 70, and 80° C.) and compared against the wild-type polypeptides (SEQ ID NO:380 and SEQ ID NO:378) and a commercial β-glucosidase benchmark (Cellobiase, Sigma, St Louis, Mo., Catalog# C6105). As shown in Table 4, the triple mutant (I216V-T219A-M246K) showed activity after the 70° C. thermal challenge, while the wild-type polypeptide and commercial benchmark did not have any observable activity after the same challenge.

TABLE 4
(Activity of 3 thermostable GSSM mutants, with WT-
(SEQID380) and a commercial benchmark Cellobiase)

| | | RT - | 66° C. - | 70° C. - | 80° C. - | | | |
|---|---|---|---|---|---|---|---|---|
| | | Activity | Activity | Activity | Activity | Residual | Residual | Residual |
| | Sample | (U/mg | (U/mg | (U/mg | (U/mg | Activity | Activity | Activity |
| SEQ ID | Description | protein) | protein) | protein) | protein) | (66° C.) | (70° C.) | (80° C.) |
| 255 | V203P | 0.253 | 0.064 | 0.006 | 0.000 | 25.1% | 2.5% | 0.0% |
| 233 | M246H | 28.398 | 23.106 | 1.931 | −0.024 | 81.4% | 6.8% | ND |
| 225 | I216V, | 10.921 | 6.589 | 4.234 | −0.014 | 60.3% | 38.8% | ND |
| | T219A, | | | | | | | |
| | M246K | | | | | | | |
| 378 | 13473 | 3.751 | 0.013 | 0.000 | 0.004 | 0.4% | ND | 0.1% |
| 380 | 27394 | 23.088 | 0.063 | 0.038 | 0.001 | 0.3% | 0.2% | 0.0% |
| Cb'ase | Commercial | 1.969 | 0.034 | 0.003 | 0.002 | 1.7% | 0.1% | 0.1% |
| | BG | | | | | | | |

[0157] Total protein and purity for a subset of GSSM mutants (V203P, M246H, and the triple mutant (I216V, T219A, M246K) was determined as described in Example 1, and the specific activity (SA) on MUG after 3 thermal challenges (66° C., 70° C., and 80° C. for 30 min), was determined. The specific activity of the triple mutant (I216V-T219A-M246K, SEQ ID NO:255) remained the highest after the 70° C. thermal challenge, while the parent β-glucosidases (SEQ ID NO:378 and SEQ ID NO:380) did not have any observable activity after the same challenge. V203P resulted in an almost complete loss of activity. Results are summarized in Table 5, below.

TABLE 5
Specific Activity (SA) of thermotolerant mutants (U/mg enzyme)

| | | RT - | 66° C. - | 70° C. - | 80° C. - |
|---|---|---|---|---|---|
| | Sample | Specific | Specific | Specific | Specific |
| | De- | Activity | Activity | Activity | Activity |
| SEQ | scrip- | (U/mg EN- | (U/mg EN- | (U/mg EN- | (U/mg EN- |
| ID | tion | ZYME) | ZYME) | ZYME) | ZYME) |
| 233 | M246H | 94.659 | 77.021 | 6.437 | −0.079 |
| 225 | I216V, | 36.404 | 21.963 | 14.112 | −0.045 |
| | T219A, | | | | |
| | M246K | | | | |
| 378 | 13473 | 16.039 | 0.057 | −0.001 | 0.017 |
| 380 | 27394 | 69.965 | 0.192 | 0.116 | 0.004 |

### Example 3

### Further Evolution of Thermotolerance, Via TMCA-Reassembly Method

[0158] Thirteen of the amino acid mutations identified from the GSSM screen and listed in Tables 6A and 6B were chosen for combinatorial assembly using the TMCA-reassembly method. This method is described in WO2009/018449 and involves annealing multiple mutagenic oligonucleotides to a denatured double-stranded vector template. Upon digestion of parental DNA, the result is a mixture of clones containing various combinations of mutations, referred to as the “reassembly library.”

[0159] Two different parental polypeptides were used to generate two reassembly libraries. For the first library (“Reassembly Library 1”), 13 amino acid changes were reassembled into the original parental β-glucosidase polypeptide (SEQ ID NO:380) and for the second library (“Reassembly Library 2”), 10 amino acid changes were selected for reassembly in an alternate β-glucosidase parental polypeptide (SEQ ID NO:378).

TABLE 6A
Reassembly Library for original parental
β-glucosidase (SEQ ID NO: 380)

| Original | New | Original | New | Codon Mutation | |
|---|---|---|---|---|---|
| Codon | Codon | AA | AA | Location | Mutation |
| GAT | CAT | D | H | 7 | D7H |
| TAT | TTG | Y | L | 74 | Y74L |
| ATT | GTT | I | V | 216 | I216V |
| ACG | GCG | T | A | 219 | T219A |
| ACG | AGT | T | S | 219 | T219S |
| ATG | AAG | M | K | 246 | M246K |
| ATG | CAT | M | H | 246 | M246H |
| TTT | GTT | F | V | 292 | F292V |
| TTT | ATT | F | I | 292 | F292I |
| TCA | ACT | S | T | 296 | S296T |
| TAT | TTT | Y | F | 399 | Y399F |
| GTA | TAT | V | Y | 400 | V400Y |
| TGG | TTT | W | F | 401 | W401F |

TABLE 6B
Reassembly Library for alternate parental
β-glucosidase (SEQ ID NO: 378)

| Original | New | Original | New | Codon Mutation | |
|---|---|---|---|---|---|
| Codon | Codon | AA | AA | Location | Mutation |
| GAC | CAT | D | H | 11 | D11H |
| TAT | TTG | Y | L | 78 | Y78L |
| ACC | GCG | T | A | 222 | T222A |
| ACC | AGT | T | S | 222 | T222S |
| TTC | CAT | F | H | 248 | F248H |
| TTC | AAG | F | K | 248 | F248K |
| ATC | GTT | I | V | 293 | I292V |
| TCG | ACT | S | T | 297 | S297T |
| GCC | TAT | A | Y | 398 | A398Y |
| TGG | TTT | W | F | 399 | W399F |

[0160] Variants from the TMCA-reassembly libraries derived from SEQ ID NO:380 and SEQ ID NO:378 were screened for thermotolerance as described in Example 1, with the following changes: Induction plates from both libraries were cultured at 30° C. overnight; plates from SEQ ID NO:380 library were heated to about 84, 86, 88° C. for 30 minutes; plates from SEQ ID NO:378 library were heated to about 68, 69, and 70° C. for 30 minutes. Residual MUG activity was determined for both libraries as described in Example 1, with the following changes: for the SEQ ID NO:378 reassembly library, the residual activity was determined using the activity of the 68° C. challenged sample as the reference activity, so residual activity listed is percent residual activity of the 68° C. samples. Results for the reassembly library with a β-glucosidase of SEQ ID NO:380 are summarized in Table 7, below. Results for the reassembly library with a β-glucosidase of SEQ ID NO:378 are summarized in Table 8, below.

TABLE 7

| | | Residual | Residual | Residual | Parent amino acid and position (Column Header), reassembly variants with | | | | | | | | | | | | |
|---|---|---|---|---|---|---|---|---|---|---|---|---|---|---|---|---|---|
| SEQID- | SEQID- | Activity | Activity | Activity | amino acid changes, listed in rows | | | | | | | | | | | | |
| DNA | AA | (84° C.) | (86° C.) | (88° C.) | D7 | Y74 | D154 | G200 | I216 | T219 | M246 | P253 | F292 | S296 | Y399 | V400 | W401 |
| 77 | 261 | 52.3% | 18.0% | ND | H | L | | | V | A | H | | V | T | | | |
| 78 | 262 | 48.4% | 12.2% | ND | H | L | | | V | A | K | | I | T | | | |
| 79 | 263 | 10.3% | ND | ND | H | L | | | V | A | | | I | T | | | |
| 80 | 264 | 12.5% | ND | ND | H | L | | | V | A | | | V | T | | | |
| 81 | 265 | 38.1% | ND | ND | H | L | | | V | S | K | | I | T | | Y | |
| 82 | 266 | 10.6% | ND | ND | H | L | | | V | S | | | I | T | | Y | |
| 83 | 267 | 35.8% | 95.4% | ND | H | L | | | V | S | | | V | T | | Y | |
| 84 | 268 | ND | ND | ND | H | L | | | V | | K | | V | T | | Y | |
| 85 | 269 | 61.4% | ND | ND | H | L | | | | A | K | | I | T | | | |
| 86 | 270 | 21.3% | 7.8% | ND | H | L | | | | S | K | | I | T | | | |
| 87 | 271 | 22.4% | ND | ND | H | L | | | | S | K | | V | T | | | |
| 88 | 272 | ND | ND | ND | H | L | | | | | H | | V | T | F | Y | |
| 89 | 273 | 16.5% | ND | ND | H | | | | V | A | H | | V | T | | | |
| 90 | 274 | ND | ND | ND | H | | | | V | A | H | | | T | F | Y | |
| 91 | 275 | 17.0% | 3.2% | ND | H | | | | V | A | K | | I | T | F | Y | |
| 92 | 276 | 34.7% | 13.3% | ND | H | | | | V | A | K | | I | T | | | |
| 93 | 277 | 8.0% | ND | ND | H | | | | V | A | K | | | T | | | F |
| 94 | 278 | 26.4% | 5.3% | ND | H | | | | V | A | | | V | T | F | | F |
| 95 | 279 | 13.0% | 3.2% | ND | H | | | | V | A | | | V | T | | | F |
| 96 | 280 | 39.8% | 15.4% | ND | H | | | | V | S | H | | I | T | | | F |
| 97 | 281 | 23.3% | ND | ND | H | | | | V | S | H | | I | T | | Y | |
| 98 | 282 | 35.0% | 13.0% | 6.7% | H | | | | V | S | H | | V | T | F | | F |
| 99 | 283 | 42.0% | 13.8% | ND | H | | | | V | S | K | | I | T | | | F |
| 100 | 284 | 20.0% | 5.6% | ND | H | | | | V | S | K | | V | T | | Y | |
| 101 | 285 | 13.0% | 3.1% | ND | H | | | | V | S | | | I | T | F | | F |
| 102 | 286 | 9.4% | ND | ND | H | | | | V | S | | | I | T | F | Y | |
| 103 | 287 | 18.3% | 2.9% | ND | H | | | | V | S | | | I | T | | | F |
| 104 | 288 | 17.7% | 4.3% | ND | H | | | | V | S | | | V | T | F | | F |
| 105 | 289 | 13.6% | 2.6% | ND | H | | | | V | S | | | V | T | | | F |
| 106 | 290 | 12.8% | 3.2% | ND | H | | | | V | | K | | I | T | F | | F |
| 107 | 291 | 9.4% | ND | ND | H | | | | V | | K | | V | T | | | F |
| 108 | 292 | 69.2% | 28.4% | ND | H | | | | | A | H | | V | T | F | Y | |
| 109 | 293 | 46.3% | 10.8% | ND | H | | | | | A | H | | V | T | | Y | |
| 110 | 294 | 27.5% | ND | ND | H | | | | | A | K | | V | T | F | Y | |
| 111 | 295 | 23.6% | 5.1% | ND | H | | | | | A | | | I | T | F | | F |
| 112 | 296 | 14.6% | 2.8% | ND | H | | | | | A | | | I | T | | | F |
| 113 | 297 | 21.0% | 3.9% | ND | H | | | | | A | | | V | T | F | | F |
| 114 | 298 | 13.3% | ND | ND | H | | | | | S | H | | I | T | | Y | |
| 115 | 299 | 28.8% | 7.9% | ND | H | | | | | S | K | | I | T | | | F |
| 116 | 300 | 10.9% | 3.0% | ND | H | | | | | S | K | | I | T | | Y | |
| 117 | 301 | 21.1% | 3.6% | ND | H | | | | | S | K | | V | T | F | Y | |
| 118 | 302 | 3.5% | ND | ND | H | | | | | S | K | | | T | | | F |
| 119 | 303 | 18.9% | 4.1% | ND | H | | | | | S | | | I | T | F | | F |
| 119 | 303 | 11.8% | ND | ND | H | | | | | S | | | I | T | F | | F |
| 120 | 304 | 25.7% | 4.9% | ND | H | | | | | S | | P | V | T | F | | F |
| 121 | 304 | 21.7% | 8.2% | ND | H | | | | | S | | | V | T | F | | F |
| 122 | 305 | 7.1% | ND | ND | H | | | | | S | | | V | T | | | F |
| 123 | 306 | 5.8% | ND | ND | H | | | | | | H | | V | T | F | | F |
| 124 | 307 | 19.6% | 2.3% | ND | H | | | | | | K | | I | T | F | | F |
| 125 | 308 | 5.6% | ND | ND | | L | | | V | A | | | I | T | | | |
| 126 | 309 | 68.0% | 17.1% | ND | | L | | | V | A | | | V | T | | Y | |
| 127 | 310 | 23.2% | 5.5% | ND | | L | | | V | A | | | V | T | | | |
| 128 | 311 | ND | ND | ND | | L | | | V | S | K | | I | T | | | |
| 129 | 312 | 22.3% | 6.3% | ND | | L | | | V | S | K | | V | T | | | |
| 130 | 313 | 36.6% | ND | ND | | L | | | V | S | | | I | T | F | Y | |
| 131 | 314 | 22.5% | 4.0% | ND | | L | | | V | | K | | V | T | | Y | |
| 132 | 315 | 7.0% | ND | ND | | L | | | | A | | | I | T | | | |
| 133 | 316 | 38.1% | 6.2% | ND | | L | | | | A | | | V | T | | | |
| 134 | 317 | 28.5% | ND | ND | | L | | | | S | K | | I | T | | | |
| 135 | 318 | 15.2% | 4.9% | ND | | L | | | | S | | | V | T | | Y | |
| 136 | 319 | 6.8% | ND | ND | | | | | V | A | H | | I | T | F | | |
| 137 | 320 | 49.7% | 19.3% | 6.7% | | | | | V | A | H | | V | T | | | F |
| 138 | 321 | 9.4% | ND | ND | | | | | V | A | K | | I | T | | | |
| 139 | 322 | 57.1% | 22.7% | 6.3% | | | | | V | A | K | | V | T | F | | F |
| 31 | 225 | ND | 2.5% | ND | | | | | V | A | K | | | | | | |
| 140 | 323 | 23.3% | 3.9% | ND | | | | | V | A | | | I | T | F | | F |
| 141 | 324 | 8.7% | ND | ND | | | | | V | A | | | I | T | F | Y | |
| 142 | 325 | 7.9% | ND | ND | | | | | V | A | | | V | T | F | Y | |
| 143 | 326 | 18.3% | 4.0% | ND | | | | | V | A | | | V | T | | | F |
| 144 | 327 | 24.1% | 5.2% | ND | | | | | V | S | H | | I | T | F | | F |
| 145 | 328 | 28.0% | 5.4% | ND | | | | | V | S | K | | I | T | F | | F |
| 146 | 329 | 53.2% | 8.8% | ND | | | | | V | S | K | | I | T | F | Y | |
| 147 | 330 | 31.4% | 8.9% | ND | | | | | V | S | K | | I | T | | | F |
| 148 | 331 | 24.4% | 7.9% | ND | | | | | V | S | K | | I | T | | Y | |
| 149 | 332 | 22.6% | 6.5% | ND | | | | | V | S | K | | V | T | | | F |
| 150 | 333 | ND | ND | ND | | | N | | V | S | K | | V | | F | | F |
| 151 | 334 | 21.3% | 4.7% | ND | | | | | V | S | | | I | T | F | | F |
| 152 | 335 | ND | ND | ND | | | | | V | S | | | I | T | F | Y | |
| 153 | 336 | 17.6% | 4.0% | ND | | | | | V | S | | | V | T | | | F |
| 154 | 337 | 3.1% | ND | ND | | | | | V | | H | | I | T | F | | F |
| 155 | 338 | 12.2% | ND | ND | | | | | V | | K | | I | T | F | | F |
| 156 | 339 | 12.0% | ND | ND | | | | | V | | K | | I | T | | | F |
| 157 | 340 | 34.5% | 6.0% | ND | | | | | | A | K | | I | T | F | Y | |
| 158 | 341 | 27.1% | 29.4% | ND | | | | | | A | K | | I | T | | Y | |
| 159 | 342 | 31.4% | 7.4% | ND | | | | | | A | K | | V | T | | Y | |
| 160 | 343 | 19.2% | 3.4% | ND | | | | | | A | | | I | T | F | | F |
| 161 | 344 | 25.8% | 8.4% | ND | | | | | | A | | | V | T | | | F |
| 162 | 345 | 33.7% | ND | ND | | | | | | S | H | | I | T | | Y | |
| 163 | 346 | 34.1% | 7.4% | ND | | | | | | S | K | | I | T | F | Y | |
| 164 | 347 | 29.9% | 11.1% | ND | | | | | | S | K | | I | T | | | F |
| 165 | 348 | 12.4% | ND | ND | | | | | | S | K | | I | T | | Y | |
| 166 | 349 | 28.0% | ND | ND | | | | | | S | K | | V | T | F | Y | |
| 167 | 350 | 27.0% | 3.7% | ND | | | | | | S | | | I | T | F | | F |
| 168 | 351 | 12.8% | ND | ND | | | | | | S | | | V | T | F | | F |
| 169 | 352 | ND | ND | ND | | | | G | | S | | | V | T | F | Y | |
| 170 | 353 | 25.0% | 3.0% | ND | | | | | | | K | | I | T | | | F |
| 171 | 354 | 7.0% | ND | ND | | | | | | | K | | V | T | | | F |
| 172 | 355 | ND | ND | ND | | | | | | | | | I | T | F | | F |

TABLE 8

| | | ND = no residual activity detected) | | WT AA (listed in column header), | | | | | | | | | | |
|---|---|---|---|---|---|---|---|---|---|---|---|---|---|---|
| SEQID- | SEQID- | Avg % residual activity | Avg % residual activity | reassembly variant with AA changes listed in rows | | | | | | | | | | |
| DNA | AA | (68-69° C.) | (68-70° C.) | D11 | N96 | T222 | D245 | F248 | I293 | S297 | H303 | L309 | R315 | D363 |
| 173 | 356 | 37.2% | 7.9% | | | A | | H | | T | | | | G |
| 174 | 357 | 29.2% | 7.4% | H | | | | H | V | T | | | H | |
| 175 | 358 | 34.7% | 12.6% | | | A | | H | | T | | L | | |
| 176 | 359 | 44.7% | 9.5% | | | | | H | | T | R | | | |
| 177 | 360 | 34.8% | ND | H | | | H | H | V | T | | | | |
| 178 | 361 | 39.2% | 8.7% | H | | A | | H | V | T | | | | |
| 179 | 362 | 41.6% | 7.2% | | | A | | H | V | T | | | | |
| 180 | 363 | 37.7% | 9.0% | H | | S | | H | V | T | | | | |
| 181 | 364 | 25.7% | 6.4% | | | S | | H | V | T | | | | |
| 182 | 365 | 36.2% | 7.2% | H | | | | H | V | T | | | | |
| 183 | 366 | 39.1% | 6.4% | | | | | H | V | T | | | | |
| 184 | 367 | 40.7% | 13.7% | | | A | | K | V | T | | | | |
| 185 | 368 | 28.1% | 7.9% | | | S | | K | V | T | | | | |
| 186 | 369 | 28.3% | 4.8% | | | | | K | V | T | | | | |
| 187 | 370 | 31.6% | ND | | | A | | | V | T | | | | |
| 188 | 371 | 28.5% | ND | | | | H | H | | T | | | | |
| 189 | 372 | 41.5% | 8.5% | H | | A | | H | | T | | | | |
| 190 | 358 | 34.5% | 7.2% | | | A | | H | | T | | | | |
| 191 | 373 | 24.8% | 6.5% | | | S | | H | | T | | | | |
| 192 | 374 | 36.9% | ND | | N | | | H | | T | | | | |
| 193 | 375 | 37.7% | ND | H | | | | H | | T | | | | |
| 194 | 374 | 38.0% | 5.9% | | | | | H | | T | | | | |
| 195 | 376 | 25.7% | ND | H | | | | K | | T | | | | |
| 196 | 377 | 27.7% | 6.8% | | | | | K | | T | | | | |

TABLE 9A

| Corresp. | Sequence Name | | | | | | | | |
|---|---|---|---|---|---|---|---|---|---|
| Sequence Pos. | Q3 | K6 | D7 | T24 | V60 | I63 | A68 | A73 | Y74 |
| SEQ ID NO. | Q-3 | K-6 | D-7 | T-24 | V-60 | I-63 | A-68 | A-73 | Y-74 |
| 379/380 | | | | | | | | | |
| SEQ ID NO. 378 | Q-4 | A-10 | D-11 | D-28 | R-64 | V-67 | E-72 | A-77 | Y-78 |
| US8101393-0094 | — | K-6 | D-7 | T-24 | V-60 | I-63 | A-68 | A-73 | Y-74 |
| US8101393-0388 | — | K-6 | D-7 | T-24 | V-60 | I-63 | A-68 | A-73 | Y-74 |
| US8101393-0172 | Q-4 | A-10 | D-11 | D-28 | R-64 | V-67 | E-72 | G-77 | Y-78 |
| JP2011205992-0018 | A-2 | A-8 | D-9 | R-26 | G-62 | I-65 | A-70 | A-75 | Y-76 |
| JP2011205992-0023 | K-2 | A-8 | N-9 | S-26 | P-62 | I-65 | E-70 | A-75 | Y-76 |
| JP2011205992-0022 | A-2 | P-8 | R-9 | T-26 | Q-62 | V-65 | N-70 | A-75 | Y-76 |
| US20110214199- | D-4 | H-10 | D-11 | A-28 | R-64 | I-67 | Q-72 | A-77 | Y-78 |
| 58656 | | | | | | | | | |
| US20110214199- | D-20 | D-26 | D-27 | A-44 | H-80 | I-83 | R-88 | A-93 | Y-94 |
| 62406 | | | | | | | | | |
| US20110214199- | — | N-6 | D-7 | S-24 | R-60 | V-63 | W-68 | S-73 | Y-74 |
| 47919 | | | | | | | | | |
| US20110214199- | — | E-5 | G-6 | G-23 | E-59 | L-62 | R-67 | A-72 | Y-73 |
| 60662 | | | | | | | | | |
| US20110214199- | — | D-12 | G-13 | T-30 | R-66 | V-69 | D-74 | H-79 | Y-80 |
| 36660 | | | | | | | | | |
| US20110214199- | — | P-18 | A-19 | R-36 | R-72 | V-75 | E-80 | A-85 | Y-86 |
| 17908 | | | | | | | | | |
| US20110214199- | — | E-6 | K-7 | Q-24 | E-60 | I-63 | S-68 | V-73 | Y-74 |
| 25308 | | | | | | | | | |
| US20110214199- | — | E-6 | K-7 | Q-24 | E-60 | I-63 | S-68 | A-73 | Y-74 |
| 64004 | | | | | | | | | |
| US20110214199- | P-18 | S-24 | D-25 | T-42 | R-78 | V-81 | E-86 | A-91 | Y-92 |
| 25023 | | | | | | | | | |
| US20110214199- | — | E-6 | K-7 | Q-24 | E-60 | I-63 | S-68 | V-73 | Y-74 |
| 52644 | | | | | | | | | |
| US20110214199- | — | P-15 | A-16 | R-33 | R-69 | V-72 | D-77 | A-82 | Y-83 |
| 13862 | | | | | | | | | |
| US20110214199- | E-3 | K-9 | D-10 | N-27 | K-63 | V-66 | E-71 | A-76 | Y-77 |
| 29446 | | | | | | | | | |
| US20110214199- | — | E-6 | K-7 | Q-24 | E-60 | I-63 | S-68 | A-73 | Y-74 |
| 5988 | | | | | | | | | |
| US20110214199- | — | E-6 | K-7 | Q-24 | E-60 | I-63 | S-68 | A-73 | Y-74 |
| 23246 | | | | | | | | | |
| US20110214199- | E-2 | K-8 | D-9 | K-26 | K-62 | V-65 | S-70 | S-75 | Y-76 |
| 12000 | | | | | | | | | |
| US20110214199- | R-3 | K-9 | D-10 | N-27 | K-63 | I-66 | E-71 | A-76 | Y-77 |
| 56949 | | | | | | | | | |
| US8101393-0272 | — | A-18 | G-19 | T-36 | D-72 | V-75 | R-80 | D-85 | Y-86 |
| US8101393-0014 | T-6 | A-12 | G-13 | D-30 | R-66 | V-69 | G-74 | A-79 | Y-80 |
| US8101393-0398 | A-17 | P-23 | G-24 | A-41 | S-77 | V-80 | E-85 | S-90 | Y-91 |
| US8101393-0492 | A-17 | P-23 | G-24 | A-41 | S-77 | V-80 | E-85 | S-90 | Y-91 |
| US8101393-0400 | P-17 | P-23 | G-24 | T-41 | P-77 | V-80 | D-85 | S-90 | Y-91 |
| US8101393-0266 | — | A-17 | D-18 | A-35 | R-71 | V-74 | E-79 | A-84 | Y-85 |
| US8101393-0366 | — | E-4 | G-5 | G-22 | R-58 | L-61 | W-66 | A-71 | Y-72 |
| US8101393-0342 | T-2 | S-8 | N-9 | N-26 | R-62 | V-65 | D-70 | A-75 | Y-76 |
| US8101393-0356 | T-2 | K-8 | G-9 | R-26 | P-62 | I-65 | A-70 | G-75 | Y-76 |
| US8101393-0320 | S-2 | K-8 | D-9 | N-26 | E-62 | I-65 | E-70 | S-75 | Y-76 |
| US7314974-19451 | — | N-4 | D-5 | S-22 | R-58 | V-61 | W-66 | S-71 | Y-72 |
| US7314974-8251 | — | — | — | T-17 | R-53 | V-56 | E-61 | A-66 | Y-67 |
| US7630836-9340 | D-4 | H-10 | D-11 | A-28 | R-64 | I-67 | Q-72 | A-77 | Y-78 |
| US7630836-12787 | — | P-18 | A-19 | R-36 | R-72 | V-75 | E-80 | A-85 | Y-86 |
| US20090220480- | — | D-6 | N-7 | R-24 | G-60 | V-63 | W-68 | A-73 | Y-74 |
| 0018 | | | | | | | | | |
| US20120034253- | — | E-6 | K-7 | Q-24 | E-60 | I-63 | S-68 | V-73 | Y-74 |
| 0080 | | | | | | | | | |
| US20120034253- | — | E-6 | K-7 | Q-24 | E-60 | I-63 | S-68 | A-73 | Y-74 |
| 0077 | | | | | | | | | |
| US20120034253- | — | E-6 | K-7 | Q-24 | E-60 | I-63 | S-68 | A-73 | Y-74 |
| 0078 | | | | | | | | | |
| WO2012016960- | — | D-36 | G-37 | R-54 | V-90 | V-93 | D-98 | S-103 | Y-104 |
| 11369 | | | | | | | | | |
| US20120015408- | K-3 | R-9 | D-10 | N-27 | K-63 | V-66 | E-71 | A-76 | Y-77 |
| 0002 | | | | | | | | | |
| US20120015408- | K-3 | R-9 | D-10 | N-27 | K-63 | V-66 | E-71 | A-76 | Y-77 |
| 0004 | | | | | | | | | |
| US20120015408- | K-3 | R-9 | D-10 | D-27 | K-63 | V-66 | E-71 | A-76 | Y-77 |
| 0006 | | | | | | | | | |
| US20120015408- | K-3 | R-9 | D-10 | N-27 | K-63 | V-66 | E-71 | A-76 | Y-77 |
| 0008 | | | | | | | | | |
| US20120015408- | K-3 | R-9 | D-10 | N-27 | K-63 | V-66 | E-71 | A-76 | Y-77 |
| 0010 | | | | | | | | | |
| US20120015408- | K-3 | R-9 | D-10 | N-27 | K-63 | V-66 | E-71 | A-76 | Y-77 |
| 0012 | | | | | | | | | |
| US20120015408- | K-3 | R-9 | D-10 | N-27 | K-63 | V-66 | E-71 | A-76 | Y-77 |
| 0014 | | | | | | | | | |
| US20120015408- | K-3 | R-9 | D-10 | N-27 | K-63 | V-66 | E-71 | A-76 | Y-77 |
| 0016 | | | | | | | | | |
| US20120015408- | K-3 | R-9 | D-10 | N-27 | K-63 | V-66 | E-71 | A-76 | Y-77 |
| 0018 | | | | | | | | | |
| US20120015408- | K-3 | R-9 | D-10 | N-27 | K-63 | V-66 | E-71 | A-76 | Y-77 |
| 0020 | | | | | | | | | |
| US20120015408- | K-3 | R-9 | D-10 | N-27 | K-63 | V-66 | E-71 | A-76 | Y-77 |
| 0022 | | | | | | | | | |
| US20120015408- | K-3 | R-9 | D-10 | N-27 | K-63 | V-66 | E-71 | A-76 | Y-77 |
| 0026 | | | | | | | | | |
| US20120015408- | K-3 | R-9 | D-10 | N-27 | K-63 | V-66 | E-71 | A-76 | Y-77 |
| 0028 | | | | | | | | | |
| US20120015408- | K-3 | R-9 | D-10 | D-27 | K-63 | V-66 | E-71 | A-76 | Y-77 |
| 0030 | | | | | | | | | |
| US20120015408- | K-3 | R-9 | D-10 | N-27 | K-63 | V-66 | E-71 | A-76 | Y-77 |
| 0032 | | | | | | | | | |
| US20120015408- | K-3 | R-9 | D-10 | D-27 | K-63 | V-66 | E-71 | A-76 | Y-77 |
| 0034 | | | | | | | | | |
| US20120015408- | K-3 | R-9 | D-10 | N-27 | K-63 | V-66 | E-71 | A-76 | Y-77 |
| 0036 | | | | | | | | | |
| US20120015408- | K-3 | R-9 | D-10 | D-27 | K-63 | V-66 | E-71 | A-76 | Y-77 |
| 0038 | | | | | | | | | |
| US20120015408- | K-3 | R-9 | D-10 | D-27 | K-63 | V-66 | E-71 | A-76 | Y-77 |
| 0040 | | | | | | | | | |
| US20120015408- | K-3 | R-9 | D-10 | N-27 | K-63 | V-66 | E-71 | A-76 | Y-77 |
| 0042 | | | | | | | | | |
| US20120015408- | K-3 | R-9 | D-10 | D-27 | K-63 | V-66 | E-71 | A-76 | Y-77 |
| 0044 | | | | | | | | | |
| US20120015408- | K-3 | R-9 | D-10 | N-27 | K-63 | V-66 | E-71 | A-76 | Y-77 |
| 0046 | | | | | | | | | |
| US20120015408- | K-3 | R-9 | D-10 | D-27 | K-63 | V-66 | E-71 | A-76 | Y-77 |
| 0048 | | | | | | | | | |
| US20120015408- | K-3 | R-9 | D-10 | N-27 | K-63 | V-66 | E-71 | A-76 | Y-77 |
| 0050 | | | | | | | | | |
| US20120015408- | K-3 | R-9 | D-10 | D-27 | K-63 | V-66 | E-71 | A-76 | Y-77 |
| 0052 | | | | | | | | | |
| US20120015408- | K-3 | R-9 | D-10 | D-27 | K-63 | V-66 | E-71 | A-76 | Y-77 |
| 0054 | | | | | | | | | |
| US20120015408- | K-3 | R-9 | D-10 | D-27 | K-63 | V-66 | E-71 | A-76 | Y-77 |
| 0056 | | | | | | | | | |
| US20120015408- | K-3 | R-9 | D-10 | N-27 | K-63 | V-66 | E-71 | A-76 | Y-77 |
| 0058 | | | | | | | | | |
| US20120015408- | K-3 | R-9 | D-10 | D-27 | K-63 | V-66 | E-71 | A-76 | Y-77 |
| 0060 | | | | | | | | | |
| US20120015408- | K-3 | R-9 | D-10 | D-27 | K-63 | V-66 | E-71 | A-76 | Y-77 |
| 0062 | | | | | | | | | |
| US20120015408- | K-3 | R-9 | D-10 | N-27 | K-63 | V-66 | E-71 | A-76 | Y-77 |
| 0064 | | | | | | | | | |
| US20120015408- | K-3 | R-9 | D-10 | D-27 | K-63 | V-66 | E-71 | A-76 | Y-77 |
| 0066 | | | | | | | | | |
| US20120015408- | K-3 | R-9 | D-10 | N-27 | K-63 | V-66 | E-71 | A-76 | Y-77 |
| 0068 | | | | | | | | | |
| US20120015408- | K-3 | R-9 | D-10 | N-27 | K-63 | V-66 | E-71 | A-76 | Y-77 |
| 0070 | | | | | | | | | |
| US20120015408- | K-3 | R-9 | D-10 | D-27 | K-63 | V-66 | E-71 | A-76 | Y-77 |
| 0072 | | | | | | | | | |
| US20120015408- | K-3 | R-9 | D-10 | D-27 | K-63 | V-66 | E-71 | A-76 | Y-77 |
| 0074 | | | | | | | | | |
| US20120015408- | K-3 | R-9 | D-10 | D-27 | K-63 | V-66 | E-71 | A-76 | Y-77 |
| 0076 | | | | | | | | | |
| US20120015408- | K-3 | R-9 | D-10 | D-27 | K-63 | V-66 | E-71 | A-76 | Y-77 |
| 0078 | | | | | | | | | |
| US20120015408- | K-3 | R-9 | D-10 | N-27 | K-63 | V-66 | E-71 | A-76 | Y-77 |
| 0080 | | | | | | | | | |
| US20120015408- | K-3 | R-9 | D-10 | N-27 | K-63 | V-66 | E-71 | A-76 | Y-77 |
| 0082 | | | | | | | | | |
| US20120015408- | K-3 | R-9 | D-10 | D-27 | K-63 | V-66 | E-71 | A-76 | Y-77 |
| 0086 | | | | | | | | | |
| US20120015408- | K-3 | R-9 | D-10 | N-27 | K-63 | V-66 | E-71 | A-76 | Y-77 |
| 0084 | | | | | | | | | |
| US20120015408- | K-3 | R-9 | D-10 | D-27 | K-63 | V-66 | E-71 | A-76 | Y-77 |
| 0088 | | | | | | | | | |
| US20120015408- | K-3 | R-9 | D-10 | D-27 | K-63 | V-66 | E-71 | A-76 | Y-77 |
| 0090 | | | | | | | | | |
| US20120015408- | K-3 | R-9 | D-10 | N-27 | K-63 | V-66 | E-71 | A-76 | Y-77 |
| 0092 | | | | | | | | | |
| US20120015408- | K-3 | R-9 | D-10 | D-27 | K-63 | V-66 | E-71 | A-76 | Y-77 |
| 0094 | | | | | | | | | |
| US20120015408- | K-3 | R-9 | D-10 | D-27 | K-63 | V-66 | E-71 | A-76 | Y-77 |
| 0096 | | | | | | | | | |
| US20120015408- | K-3 | R-9 | D-10 | D-27 | K-63 | V-66 | E-71 | A-76 | Y-77 |
| 0098 | | | | | | | | | |
| US20120015408- | K-3 | R-9 | D-10 | D-27 | K-63 | V-66 | E-71 | A-76 | Y-77 |
| 0100 | | | | | | | | | |
| US20120015408- | K-3 | R-9 | D-10 | D-27 | K-63 | V-66 | E-71 | A-76 | Y-77 |
| 0102 | | | | | | | | | |
| US20120015408- | K-3 | R-9 | D-10 | D-27 | K-63 | V-66 | E-71 | A-76 | Y-77 |
| 0104 | | | | | | | | | |
| US20120015408- | K-3 | R-9 | D-10 | D-27 | K-63 | V-66 | E-71 | A-76 | Y-77 |
| 0106 | | | | | | | | | |
| US20120015408- | K-3 | R-9 | D-10 | D-27 | K-63 | V-66 | E-71 | A-76 | Y-77 |
| 0108 | | | | | | | | | |
| US20120015408- | K-3 | R-9 | D-10 | N-27 | K-63 | V-66 | E-71 | A-76 | Y-77 |
| 0110 | | | | | | | | | |
| US20120015408- | K-3 | R-9 | D-10 | D-27 | K-63 | V-66 | E-71 | A-76 | Y-77 |
| 0112 | | | | | | | | | |
| US20120015408- | K-3 | R-9 | D-10 | D-27 | K-63 | V-66 | E-71 | A-76 | Y-77 |
| 0114 | | | | | | | | | |
| US20120015408- | K-3 | R-9 | D-10 | D-27 | K-63 | V-66 | E-71 | A-76 | Y-77 |
| 0116 | | | | | | | | | |
| US20120015408- | K-3 | R-9 | D-10 | D-27 | K-63 | V-66 | E-71 | A-76 | Y-77 |
| 0118 | | | | | | | | | |
| US20120015408- | K-3 | R-9 | D-10 | D-27 | K-63 | V-66 | E-71 | A-76 | Y-77 |
| 0120 | | | | | | | | | |
| US20120015408- | K-3 | R-9 | D-10 | D-27 | K-63 | V-66 | E-71 | A-76 | Y-77 |
| 0122 | | | | | | | | | |
| US20120015408- | K-3 | R-9 | D-10 | N-27 | K-63 | V-66 | E-71 | A-76 | Y-77 |
| 0124 | | | | | | | | | |
| US8202716-0464 | E-3 | E-9 | G-10 | R-27 | Q-63 | V-66 | E-71 | S-76 | Y-77 |
| US20110262988- | A-2 | K-8 | D-9 | N-26 | E-62 | I-65 | E-70 | S-75 | Y-76 |
| 0002 | | | | | | | | | |
| US20110262988- | S-25 | K-31 | D-32 | N-49 | E-85 | I-88 | E-93 | S-98 | Y-99 |
| 0003 | | | | | | | | | |
| US20110151538- | S-54 | K-60 | D-61 | N-78 | E-114 | I-117 | E-122 | S-127 | Y-128 |
| 0130 | | | | | | | | | |
| US20100003234- | K-2 | E-8 | N-9 | S-26 | V-62 | V-65 | Q-70 | A-75 | Y-76 |
| 0048 | | | | | | | | | |
| US6184018-0012 | S-2 | K-8 | D-9 | N-26 | E-62 | I-65 | E-70 | S-75 | Y-76 |
| US6377893-0063 | — | K-3 | D-4 | N-21 | E-57 | I-60 | E-65 | S-70 | Y-71 |
| ACJ34717 | K-11 | K-17 | D-18 | T-35 | V-71 | V-74 | T-79 | G-84 | Y-85 |
| ADD27066 | K-2 | A-8 | N-9 | S-26 | P-62 | I-65 | E-70 | A-75 | Y-76 |
| ACZ42845 | A-9 | A-15 | D-16 | R-33 | Q-69 | I-72 | R-77 | A-82 | Y-83 |
| ABQ91969 | T-2 | Q-8 | G-9 | R-26 | R-62 | I-65 | S-70 | A-75 | Y-76 |
| ABU56651 | A-2 | D-8 | D-9 | R-26 | R-62 | I-65 | S-70 | A-75 | Y-76 |
| AEY92801 | D-6 | H-12 | D-13 | A-30 | R-66 | I-69 | Q-74 | A-79 | Y-80 |
| CAD55382 | D-20 | D-26 | D-27 | A-44 | H-80 | I-83 | R-88 | A-93 | Y-94 |
| AD073143 | T-2 | K-8 | E-9 | M-26 | R-62 | I-65 | G-70 | H-75 | Y-76 |
| CCA60311 | — | A-18 | G-19 | T-36 | D-72 | V-75 | R-80 | D-85 | Y-86 |
| ADI15206 | P-13 | P-19 | G-20 | H-37 | E-73 | L-76 | S-81 | S-86 | Y-87 |
| ADI12494 | D-6 | H-12 | D-13 | A-30 | R-66 | I-69 | R-74 | A-79 | Y-80 |
| ACU35736 | E-2 | E-8 | G-9 | K-26 | E-62 | V-65 | D-70 | A-75 | Y-76 |
| BAC69512 | D-4 | H-10 | D-11 | A-28 | R-64 | I-67 | Q-72 | A-77 | Y-78 |
| AEN08263 | D-6 | R-12 | D-13 | G-30 | P-66 | I-69 | R-74 | A-79 | Y-80 |
| CCA53915 | D-25 | P-31 | D-32 | A-49 | P-85 | I-88 | G-93 | A-98 | Y-99 |
| CAJ88063 | D-6 | A-12 | D-13 | A-30 | P-66 | I-69 | R-74 | A-79 | Y-80 |
| ABF87202 | — | N-6 | D-7 | S-24 | R-60 | V-63 | W-68 | S-73 | Y-74 |
| BAJ30040 | H-3 | A-9 | N-10 | S-27 | P-63 | L-66 | S-71 | A-76 | Y-77 |
| ACO44852 | T-4 | N-10 | G-11 | S-28 | P-64 | L-67 | E-72 | A-77 | Y-78 |
| AF059750 | — | E-12 | G-13 | H-30 | P-66 | V-69 | D-74 | H-79 | Y-80 |
| BAJ31549 | Q-27 | A-33 | G-34 | D-51 | R-87 | V-90 | E-95 | A-100 | Y-101 |
| ACY97307 | T-18 | Q-24 | D-25 | A-42 | R-78 | V-81 | E-86 | A-91 | Y-92 |
| ACM06095 | S-2 | H-8 | G-9 | G-26 | P-62 | V-65 | E-70 | A-75 | Y-76 |
| AEI64652 | — | N-6 | D-7 | H-24 | R-60 | V-63 | W-68 | S-73 | Y-74 |
| BAG17581 | D-20 | A-26 | D-27 | A-44 | P-80 | I-83 | Q-88 | A-93 | Y-94 |
| AEM83530 | D-6 | H-12 | D-13 | A-30 | R-66 | I-69 | R-74 | A-79 | Y-80 |
| ADG89307 | — | E-16 | G-17 | D-34 | R-70 | V-73 | E-78 | A-83 | Y-84 |
| ABG04991 | — | E-5 | G-6 | G-23 | E-59 | L-62 | R-67 | A-72 | Y-73 |
| ABP54026 | P-17 | P-23 | G-24 | T-41 | D-77 | V-80 | E-85 | S-90 | Y-91 |
| ABV97405 | P-17 | P-23 | G-24 | T-41 | D-77 | V-80 | E-85 | S-90 | Y-91 |
| ADH60167 | — | K-6 | D-7 | N-24 | K-60 | V-63 | E-68 | A-73 | Y-74 |
| ADV80493 | — | K-6 | D-7 | N-24 | K-60 | V-63 | E-68 | A-73 | Y-74 |
| AEM77729 | — | K-6 | E-7 | N-24 | K-60 | V-63 | E-68 | A-73 | Y-74 |
| ABK71329 | — | D-12 | G-13 | T-30 | R-66 | V-69 | D-74 | H-79 | Y-80 |
| ACZ89864 | — | T-20 | G-21 | K-38 | A-74 | V-77 | D-82 | A-87 | Y-88 |
| BAC72965 | — | P-18 | A-19 | R-36 | R-72 | V-75 | E-80 | A-85 | Y-86 |
| ADD25173 | M-1 | K-7 | D-8 | N-25 | K-61 | V-64 | E-69 | A-74 | Y-75 |
| ABF44291 | R-12 | A-18 | G-19 | S-36 | E-72 | L-75 | A-80 | A-85 | Y-86 |
| AEY93261 | G-9 | P-15 | G-16 | R-33 | R-69 | V-72 | D-77 | S-82 | Y-83 |
| 1NP2 | — | E-6 | K-7 | Q-24 | E-60 | I-63 | S-68 | V-73 | Y-74 |
| AEG34643 | — | E-6 | K-7 | Q-24 | E-60 | I-63 | S-68 | A-73 | Y-74 |
| AFR07907 | — | E-9 | D-10 | T-27 | A-63 | I-66 | A-71 | A-76 | Y-77 |
| AEB43702 | A-17 | P-23 | G-24 | A-41 | G-77 | V-80 | E-85 | S-90 | Y-91 |
| BAL92882 | — | D-21 | G-22 | R-39 | A-75 | V-78 | D-83 | A-88 | Y-89 |
| CCA59876 | — | A-17 | D-18 | A-35 | R-71 | V-74 | E-79 | A-84 | Y-85 |
| ACU74192 | — | E-8 | N-9 | A-26 | R-62 | V-65 | K-70 | A-75 | Y-76 |
| ABV96319 | — | D-8 | N-9 | R-26 | A-62 | V-65 | E-70 | A-75 | Y-76 |
| AF053528 | — | K-19 | G-20 | S-37 | R-73 | V-76 | E-81 | A-86 | Y-87 |
| AFH40090 | — | E-6 | K-7 | Q-24 | E-60 | I-63 | S-68 | V-73 | Y-74 |
| ADL49193 | — | E-8 | G-9 | R-26 | A-62 | V-65 | D-70 | A-75 | Y-76 |
| AFE08200 | — | P-6 | D-7 | R-24 | P-60 | I-63 | W-68 | S-73 | Y-74 |
| AAN05441 | — | E-6 | K-7 | Q-24 | E-60 | I-63 | S-68 | A-73 | Y-74 |
| CAJ90043 | — | P-9 | G-10 | R-27 | R-63 | V-66 | D-71 | S-76 | Y-77 |
| AEY89575 | — | P-11 | A-12 | R-29 | R-65 | V-68 | E-73 | A-78 | Y-79 |
| AAF37730 | P-18 | S-24 | D-25 | T-42 | R-78 | V-81 | E-86 | A-91 | Y-92 |
| BAL98072 | S-2 | K-8 | G-9 | Q-26 | R-62 | V-65 | E-70 | A-75 | Y-76 |
| AAN05440 | — | E-6 | K-7 | Q-24 | E-60 | I-63 | S-68 | V-73 | Y-74 |
| AEM77895 | — | K-6 | E-7 | N-24 | K-60 | V-63 | E-68 | A-73 | Y-74 |
| ADB34272 | — | T-17 | G-18 | A-35 | R-71 | V-74 | D-79 | A-84 | Y-85 |
| ABW87307 | — | E-6 | K-7 | Q-24 | E-60 | I-63 | S-68 | V-73 | Y-74 |
| AF322365 1 | — | E-6 | K-7 | Q-24 | E-60 | I-63 | S-68 | V-73 | Y-74 |
| CAC10107 | — | P-15 | A-16 | R-33 | R-69 | V-72 | D-77 | A-82 | Y-83 |
| AEB47478 | — | E-8 | N-9 | R-26 | A-62 | V-65 | E-70 | A-75 | Y-76 |
| ADL45220 | P-17 | S-23 | D-24 | T-41 | P-77 | V-80 | D-85 | S-90 | Y-91 |
| ABK51908 | — | D-20 | R-21 | A-38 | V-74 | V-77 | D-82 | S-87 | Y-88 |
| CAN94460 | P-2 | D-8 | N-9 | N-26 | P-62 | I-65 | S-70 | A-75 | Y-76 |
| AEF18219 | — | K-6 | D-7 | N-24 | K-60 | I-63 | E-68 | A-73 | Y-74 |
| ADD39191 | — | A-29 | G-30 | R-47 | R-83 | V-86 | E-91 | A-96 | Y-97 |
| ABP52811 | — | E-8 | N-9 | H-26 | A-62 | V-65 | G-70 | T-75 | Y-76 |
| AEV88819 | — | D-36 | G-37 | R-54 | V-90 | V-93 | D-98 | S-103 | Y-104 |
| AEY89570 | — | T-20 | G-21 | A-38 | R-74 | V-77 | E-82 | A-87 | Y-88 |
| ADD01635 | — | K-6 | D-7 | D-24 | K-60 | V-63 | E-68 | A-73 | Y-74 |
| CAB95278 | — | P-9 | G-10 | T-27 | P-63 | V-66 | D-71 | S-76 | Y-77 |
| AEN13042 | — | P-9 | G-10 | E-27 | P-63 | V-66 | D-71 | S-76 | Y-77 |
| ACY97750 | — | P-12 | G-13 | D-30 | A-66 | V-69 | E-74 | A-79 | Y-80 |
| ADI10010 | — | P-7 | G-8 | Q-25 | R-61 | V-64 | D-69 | A-74 | Y-75 |
| CCB72805 | — | T-15 | G-16 | R-33 | A-69 | V-72 | G-77 | A-82 | Y-83 |
| ACY14034 | — | A-20 | D-21 | N-38 | P-74 | V-77 | S-82 | T-87 | Y-88 |
| AAZ55664 | — | A-11 | G-12 | H-29 | P-65 | V-68 | R-73 | A-78 | Y-79 |
| ADW02698 | — | P-9 | G-10 | E-27 | P-63 | V-66 | D-71 | S-76 | Y-77 |
| ABC33525 | — | K-7 | D-8 | N-25 | Q-61 | V-64 | G-69 | A-74 | Y-75 |
| ADB34282 | E-3 | Q-9 | D-10 | A-27 | P-63 | L-66 | Q-71 | A-76 | Y-77 |
| AAM23648 | E-3 | K-9 | D-10 | N-27 | K-63 | V-66 | E-71 | A-76 | Y-77 |
| CCH86028 | — | P-18 | G-19 | D-36 | P-72 | V-75 | D-80 | A-85 | Y-86 |
| ADV67544 | H-9 | A-15 | D-16 | N-33 | P-69 | L-72 | D-77 | A-82 | Y-83 |
| ACZ89862 | — | E-21 | G-22 | R-39 | P-75 | V-78 | D-83 | A-88 | Y-89 |
| ADH66252 | — | E-9 | G-10 | T-27 | A-63 | V-66 | Q-71 | A-76 | Y-77 |
| ADV80605 | — | R-6 | D-7 | N-24 | K-60 | V-63 | E-68 | A-73 | Y-74 |
| ADW05507 | — | T-20 | G-21 | A-38 | R-74 | V-77 | Q-82 | A-87 | Y-88 |
| BAA86923 | — | E-6 | K-7 | Q-24 | E-60 | I-63 | S-68 | A-73 | Y-74 |
| AAN05438 | — | E-6 | K-7 | Q-24 | E-60 | I-63 | S-68 | A-73 | Y-74 |
| CAC16438 | — | K-20 | G-21 | A-38 | S-74 | V-77 | E-82 | A-87 | Y-88 |
| CAJ89567 | — | K-20 | G-21 | A-38 | R-74 | V-77 | E-82 | A-87 | Y-88 |
| AFD27167 | T-20 | Q-26 | G-27 | S-44 | E-80 | L-83 | S-88 | A-93 | Y-94 |
| BAG20044 | — | T-27 | G-28 | T-45 | P-81 | V-84 | E-89 | D-94 | Y-95 |
| ACU71435 | — | R-7 | D-8 | G-25 | P-61 | V-64 | S-69 | T-74 | Y-75 |
| ADG87563 | — | D-43 | G-44 | A-61 | A-97 | V-100 | G-105 | A-110 | Y-111 |
| ABI35984 | — | E-6 | K-7 | Q-24 | E-60 | I-63 | S-68 | A-73 | Y-74 |
| CAB42553 | — | E-6 | K-7 | Q-24 | E-60 | I-63 | S-68 | A-73 | Y-74 |
| 1UG6 | — | E-6 | K-7 | Q-24 | E-60 | I-63 | S-68 | A-73 | Y-74 |
| CAA91220 | K-3 | R-9 | D-10 | N-27 | K-63 | V-66 | E-71 | A-76 | Y-77 |
| AFK85369 | — | K-6 | G-7 | N-24 | K-60 | V-63 | E-68 | A-73 | Y-74 |
| AEN10177 | — | T-21 | G-22 | A-39 | R-75 | V-78 | R-83 | A-88 | Y-89 |
| AEM87460 | — | P-7 | G-8 | Q-25 | R-61 | V-64 | E-69 | A-74 | Y-75 |
| AAZ81839 | E-3 | E-9 | G-10 | R-27 | Q-63 | V-66 | E-71 | S-76 | Y-77 |
| ADU50085 | — | E-31 | G-32 | H-49 | A-85 | V-88 | R-93 | S-98 | Y-99 |
| AEK47062 | — | P-20 | D-21 | S-38 | P-74 | I-77 | E-82 | T-87 | Y-88 |
| ABD68852 | K-13 | L-19 | D-20 | D-37 | P-73 | L-76 | S-81 | A-86 | Y-87 |
| ACL38401 | — | E-10 | D-11 | H-28 | R-64 | V-67 | R-72 | A-77 | Y-78 |
| ABS05424 | — | P-22 | G-23 | A-40 | R-76 | I-79 | R-84 | S-89 | Y-90 |
| AEK43773 | — | P-4 | G-5 | T-22 | S-58 | V-61 | R-66 | A-71 | Y-72 |
| AEV87561 | — | M-1 | T-2 | A-19 | P-51 | V-54 | S-59 | A-64 | Y-65 |
| ACZ86244 | P-11 | T-17 | G-18 | S-35 | R-71 | V-74 | D-79 | A-84 | Y-85 |
| AEB46173 | — | P-8 | G-9 | K-26 | A-62 | L-65 | A-70 | A-75 | Y-76 |
| BAG21567 | — | T-22 | G-23 | A-40 | R-76 | V-79 | R-84 | A-89 | Y-90 |
| ABX05041 | T-2 | S-8 | D-9 | F-26 | R-62 | V-65 | R-70 | A-75 | Y-76 |
| AFR09943 | — | P-25 | D-26 | R-43 | E-79 | V-82 | E-87 | T-92 | Y-93 |
| ACZ89285 | — | A-16 | G-17 | D-34 | P-70 | V-73 | G-78 | A-83 | Y-84 |
| ACV58907 | — | E-6 | G-7 | R-24 | Q-60 | V-63 | E-68 | S-73 | Y-74 |
| ADG89462 | — | — | M-1 | R-18 | P-54 | V-57 | E-62 | A-67 | Y-68 |
| ADU09756 | — | A-25 | G-26 | D-43 | R-79 | V-82 | G-87 | A-92 | Y-93 |
| ACZ90607 | — | — | M-1 | A-18 | P-54 | V-57 | G-62 | S-67 | Y-68 |
| ADG73989 | — | A-14 | D-15 | A-32 | P-68 | V-71 | D-76 | A-81 | Y-82 |
| AEG45154 | G-34 | D-40 | G-41 | S-58 | R-94 | V-97 | R-102 | T-107 | Y-108 |
| AEJ43907 | — | D-6 | A-7 | R-24 | E-60 | V-63 | E-68 | S-73 | Y-74 |
| ACZ20790 | — | E-21 | G-22 | R-39 | A-75 | T-78 | D-83 | A-88 | Y-89 |
| CCB77455 | P-4 | S-10 | D-11 | T-28 | P-64 | V-67 | G-72 | A-77 | Y-78 |
| ADL46625 | — | P-22 | T-23 | A-40 | P-76 | V-79 | D-84 | T-89 | Y-90 |
| ADU10772 | — | P-22 | T-23 | A-40 | P-76 | V-79 | D-84 | T-89 | Y-90 |
| ADD45899 | — | P-10 | D-11 | T-28 | D-64 | V-67 | E-72 | A-77 | Y-78 |
| CCA53920 | — | P-21 | H-22 | A-39 | P-75 | V-78 | S-83 | T-88 | Y-89 |
| BAJ28512 | — | P-21 | G-22 | A-39 | R-75 | V-78 | D-83 | S-88 | Y-89 |
| ACL70277 | A-2 | E-8 | D-9 | N-26 | R-62 | I-65 | E-70 | S-75 | Y-76 |
| CBG72797 | — | P-15 | A-16 | R-33 | R-69 | V-72 | D-77 | A-82 | Y-83 |
| AEW05616 | H-3 | A-9 | D-10 | N-27 | A-63 | I-66 | D-71 | S-76 | Y-77 |
| AEB46623 | — | A-6 | G-7 | G-24 | A-60 | I-63 | E-68 | A-73 | Y-74 |
| 1GNX | — | E-20 | G-21 | A-38 | R-74 | V-77 | E-82 | A-87 | Y-88 |
| ACV76621 | — | E-10 | D-11 | T-28 | S-64 | L-67 | G-72 | A-77 | Y-78 |
| ACZ31628 | G-35 | D-41 | G-42 | R-59 | R-95 | V-98 | S-103 | T-108 | Y-109 |
| ADH67953 | — | A-8 | S-9 | H-26 | G-62 | V-65 | D-70 | L-75 | Y-76 |
| ADB34290 | — | A-21 | G-22 | D-39 | P-75 | V-78 | D-83 | T-88 | Y-89 |
| ADU09106 | P-29 | A-35 | G-36 | T-53 | A-89 | T-92 | G-97 | A-102 | Y-103 |
| CAA82733 | — | E-20 | G-21 | A-38 | R-74 | V-77 | E-82 | A-87 | Y-88 |
| CBG67455 | — | R-37 | G-38 | A-55 | N-91 | V-94 | E-99 | A-104 | Y-105 |
| CAN00920 | — | P-27 | G-28 | D-45 | D-81 | L-84 | A-89 | A-94 | Y-95 |
| ADX71280 | — | Q-10 | G-11 | H-28 | K-64 | V-67 | S-72 | A-77 | Y-78 |
| ACQ81085 | V-18 | A-24 | D-25 | W-42 | A-78 | V-81 | E-86 | A-91 | Y-92 |
| 3AHX | E-2 | K-8 | D-9 | K-26 | K-62 | V-65 | S-70 | S-75 | Y-76 |
| ACU35632 | — | P-19 | S-20 | A-37 | P-73 | V-76 | S-81 | T-86 | Y-87 |
| AEV86556 | — | D-12 | G-13 | A-30 | R-63 | V-66 | D-71 | A-76 | Y-77 |
| AEG45006 | — | T-19 | D-20 | T-37 | P-73 | V-76 | R-81 | A-86 | Y-87 |
| BAG18801 | — | A-21 | D-22 | A-39 | P-75 | V-78 | G-83 | T-88 | Y-89 |
| ADI03707 | R-13 | P-19 | G-20 | D-37 | R-73 | V-76 | R-81 | S-86 | Y-87 |
| CAQ00266 | — | P-27 | G-28 | D-45 | E-81 | L-84 | A-89 | A-94 | Y-95 |
| ADD43929 | A-3 | D-9 | G-10 | D-27 | G-63 | I-66 | R-71 | V-76 | Y-77 |
| ADJ49823 | — | K-5 | G-6 | T-23 | P-59 | I-62 | D-67 | A-72 | Y-73 |
| ABX05062 | V-4 | A-10 | D-11 | H-28 | P-64 | L-67 | E-72 | S-77 | Y-78 |
| ADL48215 | P-5 | A-11 | G-12 | T-29 | A-65 | T-68 | G-73 | A-78 | Y-79 |
| ACU70272 | P-6 | A-12 | S-13 | A-30 | A-66 | T-69 | D-74 | A-79 | Y-80 |
| ADG88606 | P-11 | P-17 | E-18 | S-35 | R-71 | V-74 | E-79 | A-84 | Y-85 |
| AEW47954 | T-3 | S-9 | N-10 | H-27 | K-63 | I-66 | Q-71 | A-76 | Y-77 |
| ACD20223 | D-28 | K-34 | S-35 | N-52 | Q-88 | V-91 | G-96 | A-101 | Y-102 |
| AFC28171 | N-2 | S-8 | D-9 | S-26 | P-62 | I-65 | E-70 | S-75 | Y-76 |
| ADW03239 | — | A-20 | G-21 | S-38 | P-74 | V-77 | G-82 | T-87 | Y-88 |
| CBT74727 | — | K-13 | E-14 | H-31 | R-67 | V-70 | E-75 | S-80 | Y-81 |
| CAM04686 | — | P-11 | G-12 | K-29 | A-65 | V-68 | E-73 | A-78 | Y-79 |
| ACZ20966 | — | A-13 | D-14 | T-31 | A-67 | V-70 | D-75 | A-80 | Y-81 |
| AEV38153 | N-17 | K-23 | D-24 | N-41 | E-77 | V-80 | E-85 | A-90 | Y-91 |
| BAJ26623 | R-4 | A-9 | G-10 | D-27 | P-63 | V-66 | D-71 | G-76 | Y-77 |
| BAL91665 | — | M-1 | T-2 | F-19 | P-51 | V-54 | S-59 | A-64 | Y-65 |
| ACV09397 | — | A-11 | D-12 | R-29 | S-65 | I-68 | A-73 | A-78 | Y-79 |
| ADG20157 | — | E-8 | D-9 | H-26 | E-62 | L-65 | E-70 | A-75 | Y-76 |
| ADC61565 | — | D-7 | D-8 | L-25 | L-61 | V-64 | E-69 | A-74 | Y-75 |
| ACM66669 | — | K-13 | E-14 | H-31 | R-67 | V-70 | E-75 | S-80 | Y-81 |
| ABD68843 | — | K-15 | N-16 | E-33 | A-69 | L-72 | G-77 | A-82 | Y-83 |
| ABS61373 | K-3 | K-9 | D-10 | K-27 | K-63 | V-66 | E-71 | A-76 | Y-77 |
| CBA30283 | P-16 | S-22 | D-23 | A-40 | E-76 | L-79 | S-84 | S-89 | Y-90 |
| AAA22266 | S-2 | S-8 | D-9 | N-26 | E-62 | V-65 | D-70 | V-75 | Y-76 |
| CAA42814 | S-2 | K-8 | D-9 | N-26 | E-62 | I-65 | E-70 | S-75 | Y-76 |
| ABN51453 | S-25 | K-31 | D-32 | N-49 | E-85 | I-88 | E-93 | S-98 | Y-99 |
| ACZ00292 | — | A-5 | D-6 | T-23 | P-59 | L-62 | D-67 | A-72 | Y-73 |
| AEI12946 | — | A-14 | D-15 | Q-32 | P-68 | V-71 | E-76 | A-81 | Y-82 |
| ABS15474 | S-17 | K-23 | D-24 | Y-41 | R-77 | I-80 | A-85 | A-90 | Y-91 |
| ADL51094 | E-2 | K-8 | D-9 | K-26 | K-62 | V-65 | S-70 | S-75 | Y-76 |
| AFG34202 | R-3 | K-9 | D-10 | N-27 | K-63 | I-66 | E-71 | A-76 | Y-77 |
| AAN60220 | R-3 | K-9 | D-10 | N-27 | K-63 | I-66 | E-71 | A-76 | Y-77 |

| Corresp. | Sequence Name | | | | | | | |
|---|---|---|---|---|---|---|---|---|
| Sequence Pos. | E105 | Q139 | Q142 | D154 | V167 | N175 | V203 | I216 |
| SEQ ID NO. | E-105 | Q-139 | Q-142 | D-154 | V-167 | N-175 | V-203 | I-216 |
| 379/380 | | | | | | | | |
| SEQ ID NO. 378 | A-109 | Y-143 | A-146 | D-158 | C-171 | N-179 | T-207 | V-219 |
| US8101393-0094 | E-105 | H-139 | Q-142 | D-154 | V-167 | N-175 | V-203 | I-216 |
| US8101393-0388 | E-105 | Q-139 | Q-142 | D-154 | V-167 | N-175 | V-203 | I-216 |
| US8101393-0172 | A-109 | Y-143 | A-146 | D-158 | C-171 | N-179 | T-207 | V-219 |
| JP2011205992-0018 | A-107 | T-141 | A-144 | D-156 | C-169 | L-177 | V-205 | I-218 |
| JP2011205992-0023 | A-107 | Y-141 | A-144 | D-156 | C-169 | A-177 | V-205 | V-217 |
| JP2011205992-0022 | A-107 | D-141 | A-144 | D-156 | C-169 | I-177 | V-207 | V-219 |
| US20110214199- | G-109 | E-143 | A-146 | D-158 | C-171 | E-179 | A-207 | V-219 |
| 58656 | | | | | | | | |
| US20110214199- | D-125 | E-159 | A-162 | D-174 | C-187 | E-195 | M-223 | V-235 |
| 62406 | | | | | | | | |
| US20110214199- | G-105 | S-139 | V-142 | D-154 | C-167 | N-175 | V-203 | V-215 |
| 47919 | | | | | | | | |
| US20110214199- | G-104 | E-138 | A-141 | G-153 | V-166 | L-174 | L-202 | L-214 |
| 60662 | | | | | | | | |
| US20110214199- | E-111 | Q-145 | A-148 | D-160 | C-173 | A-181 | V-209 | L-221 |
| 36660 | | | | | | | | |
| US20110214199- | E-117 | Y-151 | A-154 | D-166 | C-179 | S-187 | T-215 | V-228 |
| 17908 | | | | | | | | |
| US20110214199- | R-105 | F-139 | A-142 | D-154 | C-167 | T-175 | V-203 | V-214 |
| 25308 | | | | | | | | |
| US20110214199- | R-105 | F-139 | A-142 | D-154 | C-167 | T-175 | V-203 | V-214 |
| 64004 | | | | | | | | |
| US20110214199- | C-123 | K-157 | A-160 | D-172 | C-185 | S-193 | A-221 | I-237 |
| 25023 | | | | | | | | |
| US20110214199- | R-105 | F-139 | A-142 | D-154 | C-167 | T-175 | V-203 | V-214 |
| 52644 | | | | | | | | |
| US20110214199- | E-114 | Y-148 | A-151 | D-163 | C-176 | S-184 | T-212 | V-225 |
| 13862 | | | | | | | | |
| US20110214199- | E-107 | K-142 | V-145 | D-157 | C-170 | I-178 | V-206 | I-219 |
| 29446 | | | | | | | | |
| US20110214199- | R-105 | F-139 | A-142 | D-154 | C-167 | T-175 | V-203 | V-214 |
| 5988 | | | | | | | | |
| US20110214199- | R-105 | F-139 | A-142 | D-154 | C-167 | T-175 | V-203 | V-214 |
| 23246 | | | | | | | | |
| US20110214199- | E-107 | D-141 | V-144 | D-156 | V-169 | L-177 | V-205 | I-217 |
| 12000 | | | | | | | | |
| US20110214199- | E-107 | L-141 | R-144 | D-156 | C-169 | T-177 | V-205 | V-217 |
| 56949 | | | | | | | | |
| US8101393-0272 | R-117 | Y-151 | A-154 | D-166 | C-179 | N-187 | A-215 | V-228 |
| US8101393-0014 | E-111 | E-145 | V-148 | D-160 | C-173 | I-181 | V-209 | V-221 |
| US8101393-0398 | E-122 | A-156 | A-159 | D-171 | C-184 | S-192 | V-220 | L-232 |
| US8101393-0492 | E-122 | A-156 | A-159 | D-171 | C-184 | S-192 | V-220 | L-232 |
| US8101393-0400 | E-122 | A-156 | A-159 | D-171 | C-184 | S-192 | V-220 | L-232 |
| US8101393-0266 | E-116 | E-150 | A-153 | D-165 | C-178 | S-186 | V-214 | L-227 |
| US8101393-0366 | A-103 | Y-137 | A-140 | D-152 | C-165 | T-173 | V-201 | V-212 |
| US8101393-0342 | G-107 | K-141 | V-144 | D-156 | C-169 | I-177 | V-205 | I-217 |
| US8101393-0356 | A-107 | E-141 | T-144 | D-156 | C-169 | L-177 | V-205 | V-217 |
| US8101393-0320 | L-107 | D-141 | T-144 | D-156 | V-169 | L-177 | V-205 | I-217 |
| US7314974-19451 | G-103 | S-137 | V-140 | D-152 | C-165 | N-173 | V-201 | V-213 |
| US7314974-8251 | C-98 | K-132 | A-135 | D-147 | C-160 | S-168 | A-196 | I-212 |
| US7630836-9340 | G-109 | E-143 | A-146 | D-158 | C-171 | E-179 | A-207 | V-219 |
| US7630836-12787 | E-117 | Y-151 | A-154 | D-166 | C-179 | S-187 | T-215 | V-228 |
| US20090220480- | R-105 | G-139 | V-142 | D-154 | C-167 | N-175 | V-203 | V-215 |
| 0018 | | | | | | | | |
| US20120034253- | R-105 | F-139 | A-142 | D-154 | C-167 | T-175 | V-203 | V-214 |
| 0080 | | | | | | | | |
| US20120034253- | R-105 | F-139 | A-142 | D-154 | C-167 | T-175 | V-203 | V-214 |
| 0077 | | | | | | | | |
| US20120034253- | R-105 | F-139 | A-142 | D-154 | C-167 | T-175 | V-203 | V-214 |
| 0078 | | | | | | | | |
| WO2012016960- | E-135 | E-169 | G-172 | D-184 | C-197 | S-205 | A-233 | V-244 |
| 11369 | | | | | | | | |
| US20120015408- | E-107 | K-142 | V-145 | D-157 | C-170 | I-178 | V-206 | I-219 |
| 0002 | | | | | | | | |
| US20120015408- | E-107 | K-142 | V-145 | D-157 | C-170 | I-178 | V-206 | I-219 |
| 0004 | | | | | | | | |
| US20120015408- | E-107 | K-142 | V-145 | D-157 | C-170 | I-178 | V-206 | I-219 |
| 0006 | | | | | | | | |
| US20120015408- | E-107 | K-142 | V-145 | D-157 | C-170 | I-178 | V-206 | I-219 |
| 0008 | | | | | | | | |
| US20120015408- | E-107 | K-142 | V-145 | D-157 | C-170 | I-178 | V-206 | I-219 |
| 0010 | | | | | | | | |
| US20120015408- | E-107 | K-142 | V-145 | D-157 | C-170 | I-178 | V-206 | I-219 |
| 0012 | | | | | | | | |
| US20120015408- | E-107 | K-142 | V-145 | D-157 | C-170 | I-178 | V-206 | I-219 |
| 0014 | | | | | | | | |
| US20120015408- | E-107 | K-142 | V-145 | D-157 | C-170 | I-178 | V-206 | I-219 |
| 0016 | | | | | | | | |
| US20120015408- | E-107 | K-142 | V-145 | D-157 | C-170 | I-178 | V-206 | I-219 |
| 0018 | | | | | | | | |
| US20120015408- | E-107 | K-142 | V-145 | D-157 | C-170 | I-178 | V-206 | I-219 |
| 0020 | | | | | | | | |
| US20120015408- | E-107 | K-142 | V-145 | D-157 | C-170 | I-178 | V-206 | I-219 |
| 0022 | | | | | | | | |
| US20120015408- | E-107 | K-142 | V-145 | D-157 | C-170 | I-178 | V-206 | I-219 |
| 0026 | | | | | | | | |
| US20120015408- | E-107 | K-142 | V-145 | D-157 | C-170 | I-178 | V-206 | I-219 |
| 0028 | | | | | | | | |
| US20120015408- | E-107 | K-142 | V-145 | D-157 | C-170 | I-178 | V-206 | I-219 |
| 0030 | | | | | | | | |
| US20120015408- | E-107 | K-142 | V-145 | D-157 | C-170 | I-178 | V-206 | I-219 |
| 0032 | | | | | | | | |
| US20120015408- | E-107 | K-142 | V-145 | D-157 | C-170 | I-178 | V-206 | I-219 |
| 0034 | | | | | | | | |
| US20120015408- | E-107 | K-142 | V-145 | D-157 | C-170 | I-178 | V-206 | I-219 |
| 0036 | | | | | | | | |
| US20120015408- | E-107 | K-142 | V-145 | D-157 | C-170 | I-178 | V-206 | I-219 |
| 0038 | | | | | | | | |
| US20120015408- | E-107 | K-142 | V-145 | D-157 | C-170 | I-178 | V-206 | I-219 |
| 0040 | | | | | | | | |
| US20120015408- | E-107 | E-142 | V-145 | D-157 | C-170 | I-178 | V-206 | I-219 |
| 0042 | | | | | | | | |
| US20120015408- | E-107 | K-142 | V-145 | D-157 | C-170 | I-178 | V-206 | I-219 |
| 0044 | | | | | | | | |
| US20120015408- | E-107 | K-142 | V-145 | D-157 | C-170 | I-178 | V-206 | I-219 |
| 0046 | | | | | | | | |
| US20120015408- | E-107 | K-142 | V-145 | D-157 | C-170 | I-178 | V-206 | I-219 |
| 0048 | | | | | | | | |
| US20120015408- | E-107 | K-142 | V-145 | D-157 | C-170 | I-178 | V-206 | I-219 |
| 0050 | | | | | | | | |
| US20120015408- | E-107 | K-142 | V-145 | D-157 | C-170 | I-178 | V-206 | I-219 |
| 0052 | | | | | | | | |
| US20120015408- | E-107 | K-142 | V-145 | D-157 | C-170 | I-178 | V-206 | I-219 |
| 0054 | | | | | | | | |
| US20120015408- | E-107 | K-142 | V-145 | D-157 | C-170 | I-178 | V-206 | I-219 |
| 0056 | | | | | | | | |
| US20120015408- | E-107 | K-142 | V-145 | D-157 | C-170 | I-178 | V-206 | I-219 |
| 0058 | | | | | | | | |
| US20120015408- | E-107 | K-142 | V-145 | D-157 | C-170 | I-178 | V-206 | I-219 |
| 0060 | | | | | | | | |
| US20120015408- | E-107 | K-142 | V-145 | D-157 | C-170 | I-178 | V-206 | I-219 |
| 0062 | | | | | | | | |
| US20120015408- | E-107 | K-142 | V-145 | D-157 | C-170 | I-178 | V-206 | I-219 |
| 0064 | | | | | | | | |
| US20120015408- | E-107 | K-142 | V-145 | D-157 | C-170 | I-178 | V-206 | I-219 |
| 0066 | | | | | | | | |
| US20120015408- | E-107 | K-142 | V-145 | D-157 | C-170 | I-178 | V-206 | I-219 |
| 0068 | | | | | | | | |
| US20120015408- | E-107 | K-142 | V-145 | D-157 | C-170 | I-178 | V-206 | I-219 |
| 0070 | | | | | | | | |
| US20120015408- | E-107 | K-142 | V-145 | D-157 | C-170 | I-178 | V-206 | I-219 |
| 0072 | | | | | | | | |
| US20120015408- | E-107 | K-142 | V-145 | D-157 | C-170 | I-178 | V-206 | I-219 |
| 0074 | | | | | | | | |
| US20120015408- | E-107 | K-142 | V-145 | D-157 | C-170 | I-178 | V-206 | I-219 |
| 0076 | | | | | | | | |
| US20120015408- | E-107 | K-142 | V-145 | D-157 | C-170 | I-178 | V-206 | I-219 |
| 0078 | | | | | | | | |
| US20120015408- | E-107 | K-142 | V-145 | D-157 | C-170 | I-178 | V-206 | I-219 |
| 0080 | | | | | | | | |
| US20120015408- | E-107 | K-142 | V-145 | D-157 | C-170 | I-178 | V-206 | I-219 |
| 0082 | | | | | | | | |
| US20120015408- | E-107 | K-142 | V-145 | D-157 | C-170 | I-178 | V-206 | I-219 |
| 0086 | | | | | | | | |
| US20120015408- | E-107 | K-142 | V-145 | D-157 | C-170 | I-178 | V-206 | I-219 |
| 0084 | | | | | | | | |
| US20120015408- | E-107 | K-142 | V-145 | D-157 | C-170 | I-178 | V-206 | I-219 |
| 0088 | | | | | | | | |
| US20120015408- | E-107 | K-142 | V-145 | D-157 | C-170 | I-178 | V-206 | I-219 |
| 0090 | | | | | | | | |
| US20120015408- | E-107 | K-142 | V-145 | D-157 | C-170 | I-178 | V-206 | I-219 |
| 0092 | | | | | | | | |
| US20120015408- | E-107 | K-142 | V-145 | D-157 | C-170 | I-178 | V-206 | I-219 |
| 0094 | | | | | | | | |
| US20120015408- | E-107 | K-142 | V-145 | D-157 | C-170 | I-178 | V-206 | I-219 |
| 0096 | | | | | | | | |
| US20120015408- | E-107 | K-142 | V-145 | D-157 | C-170 | I-178 | V-206 | I-219 |
| 0098 | | | | | | | | |
| US20120015408- | E-107 | K-142 | V-145 | D-157 | C-170 | I-178 | V-206 | I-219 |
| 0100 | | | | | | | | |
| US20120015408- | E-107 | K-142 | V-145 | D-157 | C-170 | I-178 | V-206 | I-219 |
| 0102 | | | | | | | | |
| US20120015408- | E-107 | K-142 | V-145 | D-157 | C-170 | I-178 | V-206 | I-219 |
| 0104 | | | | | | | | |
| US20120015408- | E-107 | K-142 | V-145 | D-157 | C-170 | I-178 | V-206 | I-219 |
| 0106 | | | | | | | | |
| US20120015408- | E-107 | K-142 | V-145 | D-157 | C-170 | I-178 | V-206 | I-219 |
| 0108 | | | | | | | | |
| US20120015408- | E-107 | K-142 | V-145 | D-157 | C-170 | I-178 | V-206 | I-219 |
| 0110 | | | | | | | | |
| US20120015408- | E-107 | K-142 | V-145 | D-157 | C-170 | I-178 | V-206 | I-219 |
| 0112 | | | | | | | | |
| US20120015408- | E-107 | K-142 | V-145 | D-157 | C-170 | I-178 | V-206 | I-219 |
| 0114 | | | | | | | | |
| US20120015408- | E-107 | K-142 | V-145 | D-157 | C-170 | I-178 | V-206 | I-219 |
| 0116 | | | | | | | | |
| US20120015408- | E-107 | K-142 | V-145 | D-157 | C-170 | I-178 | V-206 | I-219 |
| 0118 | | | | | | | | |
| US20120015408- | E-107 | K-142 | V-145 | D-157 | C-170 | I-178 | V-206 | I-219 |
| 0120 | | | | | | | | |
| US20120015408- | E-107 | K-142 | V-145 | D-157 | C-170 | I-178 | V-206 | I-219 |
| 0122 | | | | | | | | |
| US20120015408- | E-107 | K-142 | V-145 | D-157 | C-170 | I-178 | V-206 | I-219 |
| 0124 | | | | | | | | |
| US8202716-0464 | E-107 | S-141 | L-144 | D-156 | C-169 | I-177 | V-205 | I-217 |
| US20110262988- | L-107 | D-141 | T-144 | D-156 | V-169 | L-177 | V-205 | I-217 |
| 0002 | | | | | | | | |
| US20110262988- | L-130 | D-164 | T-167 | D-179 | V-192 | L-200 | V-228 | I-240 |
| 0003 | | | | | | | | |
| US20110151538- | L-159 | D-193 | T-196 | D-208 | V-221 | L-229 | V-257 | I-269 |
| 0130 | | | | | | | | |
| US20100003234- | Q-107 | K-141 | S-144 | L-156 | V-169 | F-177 | V-205 | V-218 |
| 0048 | | | | | | | | |
| US6184018-0012 | L-107 | D-141 | T-144 | D-156 | V-169 | L-177 | V-205 | I-217 |
| US6377893-0063 | L-102 | D-136 | T-139 | D-151 | V-164 | L-172 | V-200 | I-212 |
| ACJ34717 | E-116 | Y-150 | Q-153 | D-165 | V-178 | N-186 | V-214 | I-227 |
| ADD27066 | A-107 | Y-141 | A-144 | D-156 | C-169 | A-177 | V-205 | V-217 |
| ACZ42845 | G-114 | K-148 | A-151 | D-163 | V-176 | T-184 | V-212 | V-224 |
| ABQ91969 | G-107 | S-141 | A-144 | D-156 | C-169 | T-177 | L-204 | A-216 |
| ABU56651 | G-107 | A-141 | A-144 | D-156 | C-169 | T-177 | L-204 | A-216 |
| AEY92801 | A-111 | L-145 | A-148 | D-160 | C-173 | E-181 | T-209 | V-221 |
| CAD55382 | D-125 | E-159 | A-162 | D-174 | C-187 | E-195 | M-223 | V-235 |
| AD073143 | A-107 | E-141 | V-144 | D-156 | C-169 | M-177 | V-205 | V-217 |
| CCA60311 | R-117 | Y-151 | A-154 | D-166 | C-179 | N-187 | A-215 | V-228 |
| ADI15206 | G-118 | Y-152 | A-155 | D-167 | C-180 | T-188 | L-216 | H-228 |
| ADI12494 | G-111 | E-145 | A-148 | D-160 | C-173 | E-181 | T-209 | V-221 |
| ACU35736 | T-106 | H-140 | A-143 | D-155 | C-168 | G-176 | T-204 | V-216 |
| BAC69512 | G-109 | E-143 | A-146 | D-158 | C-171 | E-179 | A-207 | V-219 |
| AEN08263 | G-111 | E-145 | A-148 | D-160 | C-173 | E-181 | T-209 | I-221 |
| CCA53915 | G-130 | E-169 | A-172 | D-184 | C-197 | E-205 | T-233 | V-245 |
| CAJ88063 | G-111 | E-145 | A-148 | D-160 | C-173 | E-181 | T-209 | I-221 |
| ABF87202 | G-105 | S-139 | V-142 | D-154 | C-167 | N-175 | V-203 | V-215 |
| BAJ30040 | G-108 | E-142 | A-145 | D-157 | C-170 | E-178 | V-206 | I-218 |
| ACO44852 | G-109 | H-143 | A-146 | D-158 | C-171 | I-179 | V-207 | L-219 |
| AF059750 | S-111 | E-145 | A-148 | D-160 | C-173 | S-181 | V-209 | L-220 |
| BAJ31549 | E-132 | Y-166 | A-169 | D-181 | C-194 | N-202 | T-230 | V-243 |
| ACY97307 | A-123 | L-157 | A-160 | D-172 | C-185 | S-193 | L-221 | I-233 |
| ACM06095 | A-107 | E-141 | A-144 | D-156 | V-169 | L-177 | A-205 | V-217 |
| AEI64652 | G-105 | N-139 | V-142 | D-154 | C-167 | N-175 | V-203 | V-215 |
| BAG17581 | G-125 | E-159 | A-162 | D-174 | C-187 | E-195 | V-223 | I-235 |
| AEM83530 | G-111 | E-145 | A-148 | D-160 | C-173 | E-181 | A-209 | I-221 |
| ADG89307 | E-115 | E-149 | A-152 | D-164 | C-177 | E-185 | T-213 | V-224 |
| ABG04991 | G-104 | E-138 | A-141 | G-153 | V-166 | L-174 | L-202 | L-214 |
| ABP54026 | Q-122 | A-156 | A-159 | D-171 | C-184 | S-192 | V-220 | I-233 |
| ABV97405 | Q-122 | A-156 | A-159 | D-171 | C-184 | S-192 | V-220 | V-233 |
| ADH60167 | E-104 | K-139 | A-142 | D-154 | C-167 | I-175 | V-203 | V-216 |
| ADV80493 | E-104 | K-139 | V-142 | D-154 | C-167 | I-175 | V-203 | I-216 |
| AEM77729 | E-104 | K-139 | V-142 | D-154 | C-167 | I-175 | V-203 | I-216 |
| ABK71329 | E-111 | Q-145 | A-148 | D-160 | C-173 | A-181 | V-209 | L-221 |
| ACZ89864 | K-119 | H-153 | A-156 | D-168 | V-181 | N-189 | T-217 | I-228 |
| BAC72965 | E-117 | Y-151 | A-154 | D-166 | C-179 | S-187 | T-215 | V-228 |
| ADD25173 | E-105 | K-140 | V-143 | D-155 | C-168 | I-176 | V-204 | I-217 |
| ABF44291 | G-117 | E-151 | A-154 | D-166 | C-179 | I-187 | L-215 | A-227 |
| AEY93261 | E-114 | E-148 | A-151 | D-163 | C-176 | V-184 | V-212 | V-223 |
| 1NP2 | R-105 | F-139 | A-142 | D-154 | C-167 | T-175 | V-203 | V-214 |
| AEG34643 | R-105 | F-139 | A-142 | D-154 | C-167 | T-175 | V-203 | V-214 |
| AFR07907 | A-108 | L-142 | A-145 | D-157 | C-170 | N-178 | V-206 | V-218 |
| AEB43702 | D-122 | A-156 | A-159 | D-171 | C-184 | S-192 | V-220 | L-232 |
| BAL92882 | E-120 | E-154 | A-157 | D-169 | C-182 | S-190 | A-218 | I-229 |
| CCA59876 | E-116 | E-150 | A-153 | D-165 | C-178 | S-186 | V-214 | L-227 |
| ACU74192 | E-107 | Y-141 | A-144 | D-156 | C-169 | S-177 | L-205 | V-218 |
| ABV96319 | A-107 | E-141 | A-144 | D-156 | C-169 | N-177 | A-205 | V-216 |
| AF053528 | E-118 | E-152 | A-155 | D-167 | C-180 | S-188 | V-216 | C-229 |
| AFH40090 | R-105 | F-139 | A-142 | D-154 | C-167 | T-175 | V-203 | V-214 |
| ADL49193 | A-107 | E-141 | A-144 | D-156 | C-169 | S-177 | A-205 | L-216 |
| AFE08200 | S-105 | D-139 | V-142 | D-154 | C-167 | N-175 | V-203 | V-215 |
| AAN05441 | R-105 | F-139 | A-142 | D-154 | C-167 | T-175 | V-203 | V-214 |
| CAJ90043 | E-108 | E-142 | A-145 | D-157 | C-170 | I-178 | V-206 | V-217 |
| AEY89575 | E-110 | F-144 | A-147 | D-159 | C-172 | S-180 | V-208 | I-221 |
| AAF37730 | C-123 | K-157 | A-160 | D-172 | C-185 | S-193 | A-221 | I-237 |
| BAL98072 | A-107 | E-141 | V-144 | D-156 | C-169 | V-177 | V-205 | V-217 |
| AAN05440 | R-105 | F-139 | A-142 | D-154 | C-167 | T-175 | V-203 | V-214 |
| AEM77895 | E-104 | K-139 | V-142 | D-154 | C-167 | I-175 | V-203 | I-216 |
| ADB34272 | E-116 | E-150 | A-153 | D-165 | C-178 | S-186 | A-214 | V-224 |
| ABW87307 | R-105 | F-139 | A-142 | D-154 | C-167 | T-175 | V-203 | V-214 |
| AF322365 1 | R-105 | F-139 | A-142 | D-154 | C-167 | T-175 | V-203 | V-214 |
| CAC10107 | E-114 | Y-148 | A-151 | D-163 | C-176 | S-184 | T-212 | V-225 |
| AEB47478 | A-107 | E-141 | A-144 | D-156 | C-169 | N-177 | T-205 | V-216 |
| ADL45220 | E-122 | A-156 | A-159 | D-171 | C-184 | S-192 | V-220 | L-232 |
| ABK51908 | E-119 | Q-153 | A-156 | D-168 | C-181 | A-189 | V-217 | M-230 |
| CAN94460 | G-107 | D-142 | V-145 | D-157 | C-170 | K-178 | V-206 | V-218 |
| AEF18219 | E-104 | Y-138 | S-141 | D-153 | C-166 | I-174 | V-202 | I-215 |
| ADD39191 | E-128 | E-162 | A-165 | D-177 | C-190 | S-198 | T-226 | V-239 |
| ABP52811 | A-107 | E-141 | A-144 | D-156 | C-169 | N-177 | A-205 | V-216 |
| AEV88819 | E-135 | E-169 | G-172 | D-184 | C-197 | S-205 | A-233 | V-244 |
| AEY89570 | E-119 | H-153 | A-156 | D-168 | C-181 | S-189 | V-217 | T-230 |
| ADD01635 | E-104 | K-139 | V-142 | D-154 | C-167 | I-175 | V-203 | I-216 |
| CAB95278 | E-108 | E-142 | A-145 | D-157 | C-170 | I-178 | V-206 | V-217 |
| AEN13042 | S-108 | E-142 | G-145 | D-157 | C-170 | V-178 | M-206 | A-217 |
| ACY97750 | A-109 | F-143 | A-146 | D-158 | C-171 | S-179 | V-207 | C-219 |
| ADI10010 | E-106 | E-140 | A-143 | D-155 | C-168 | S-176 | A-204 | I-217 |
| CCB72805 | D-114 | Y-148 | A-151 | D-163 | C-176 | S-184 | V-212 | V-225 |
| ACY14034 | E-119 | Y-153 | A-156 | D-168 | C-181 | T-189 | T-217 | L-230 |
| AAZ55664 | A-110 | E-144 | A-147 | D-159 | C-172 | V-180 | V-208 | V-219 |
| ADW02698 | S-108 | E-142 | G-145 | D-157 | C-170 | V-178 | M-206 | A-217 |
| ABC33525 | A-106 | H-140 | A-143 | D-155 | C-168 | T-176 | L-204 | V-216 |
| ADB34282 | D-108 | Y-142 | A-145 | D-157 | C-170 | E-178 | V-206 | V-219 |
| AAM23648 | E-107 | K-142 | V-145 | D-157 | C-170 | I-178 | V-206 | I-219 |
| CCH86028 | E-117 | L-151 | A-154 | D-166 | C-179 | A-187 | T-215 | L-226 |
| ADV67544 | G-114 | L-148 | A-151 | G-163 | C-176 | I-184 | M-212 | L-224 |
| ACZ89862 | E-120 | E-154 | A-157 | D-169 | C-182 | S-190 | V-218 | I-229 |
| ADH66252 | T-108 | Y-142 | R-145 | D-157 | C-170 | N-178 | A-206 | V-218 |
| ADV80605 | E-104 | K-139 | V-142 | D-154 | C-167 | I-175 | V-203 | I-216 |
| ADW05507 | E-119 | D-153 | A-156 | D-168 | C-181 | S-189 | I-217 | T-230 |
| BAA86923 | R-105 | F-139 | A-142 | D-154 | C-167 | T-175 | V-203 | V-214 |
| AAN05438 | R-105 | F-139 | A-142 | D-154 | C-167 | T-175 | V-203 | V-214 |
| CAC16438 | E-119 | E-153 | A-156 | D-168 | C-181 | S-189 | V-217 | V-230 |
| CAJ89567 | D-119 | E-153 | A-156 | D-168 | C-181 | S-189 | V-217 | C-230 |
| AFD27167 | G-125 | H-159 | A-162 | D-174 | C-187 | I-195 | V-223 | V-235 |
| BAG20044 | E-126 | H-160 | A-163 | D-175 | C-188 | N-196 | A-224 | I-237 |
| ACU71435 | E-106 | Y-140 | A-143 | D-155 | C-168 | E-176 | T-204 | L-220 |
| ADG87563 | E-142 | Y-176 | A-179 | D-191 | V-204 | T-212 | A-240 | L-251 |
| ABI35984 | R-105 | F-139 | A-142 | D-154 | C-167 | T-175 | V-203 | V-214 |
| CAB42553 | R-105 | F-139 | A-142 | D-154 | C-167 | T-175 | V-203 | V-214 |
| 1UG6 | R-105 | F-139 | A-142 | D-154 | C-167 | T-175 | V-203 | V-214 |
| CAA91220 | E-107 | K-142 | V-145 | D-157 | C-170 | I-178 | V-206 | I-219 |
| AFK85369 | E-104 | Y-138 | S-141 | N-153 | C-166 | I-174 | V-202 | I-215 |
| AEN10177 | E-120 | D-154 | A-157 | D-169 | C-182 | S-190 | I-218 | T-231 |
| AEM87460 | E-106 | E-140 | A-143 | D-155 | C-168 | S-176 | A-204 | I-217 |
| AAZ81839 | A-107 | S-141 | L-144 | D-156 | C-169 | I-177 | V-205 | I-217 |
| ADU50085 | A-129 | D-163 | V-166 | D-178 | C-191 | S-199 | V-227 | L-239 |
| AEK47062 | E-119 | Y-153 | A-156 | D-168 | C-181 | H-189 | V-217 | F-230 |
| ABD68852 | G-119 | D-153 | V-156 | D-168 | C-181 | E-189 | I-217 | V-229 |
| ACL38401 | E-108 | Y-142 | A-145 | D-157 | C-170 | A-178 | A-206 | L-218 |
| ABS05424 | E-125 | E-159 | A-162 | D-174 | C-187 | S-195 | A-223 | V-235 |
| AEK43773 | C-102 | Y-136 | A-139 | D-151 | C-164 | G-172 | M-200 | A-212 |
| AEV87561 | E-96 | Y-130 | A-133 | D-145 | C-158 | H-166 | Y-194 | V-204 |
| ACZ86244 | E-116 | K-150 | A-153 | D-165 | C-178 | S-186 | T-214 | I-226 |
| AEB46173 | R-107 | A-141 | A-144 | D-156 | C-169 | S-177 | G-205 | L-217 |
| BAG21567 | E-121 | E-155 | A-158 | D-170 | C-183 | S-191 | T-219 | T-232 |
| ABX05041 | E-107 | E-141 | V-144 | D-156 | C-169 | I-177 | V-205 | V-217 |
| AFR09943 | A-124 | H-158 | A-161 | D-173 | C-186 | V-194 | A-222 | V-238 |
| ACZ89285 | A-115 | E-149 | A-152 | D-163 | C-176 | E-184 | A-212 | V-225 |
| ACV58907 | E-104 | S-138 | L-141 | D-153 | C-166 | I-174 | V-202 | I-214 |
| ADG89462 | A-99 | A-133 | A-136 | D-148 | V-161 | L-169 | V-197 | V-208 |
| ADU09756 | A-124 | E-158 | A-161 | D-173 | C-186 | E-194 | V-222 | V-235 |
| ACZ90607 | A-99 | Y-133 | A-136 | D-148 | V-161 | M-169 | A-197 | V-208 |
| ADG73989 | R-113 | E-147 | A-150 | D-162 | C-175 | S-183 | A-211 | V-224 |
| AEG45154 | E-138 | Y-172 | A-175 | D-187 | C-200 | S-208 | V-236 | L-248 |
| AEJ43907 | K-104 | S-138 | L-141 | D-153 | C-166 | I-174 | V-202 | I-214 |
| ACZ20790 | S-123 | Y-157 | A-160 | D-172 | C-185 | A-193 | T-221 | L-233 |
| CCB77455 | A-109 | H-148 | A-151 | D-163 | V-176 | L-184 | A-212 | V-222 |
| ADL46625 | E-121 | Y-155 | A-158 | D-170 | C-183 | Y-191 | T-219 | L-232 |
| ADU10772 | E-121 | Y-155 | A-158 | D-170 | C-183 | Y-191 | T-219 | L-232 |
| ADD45899 | R-109 | L-143 | A-146 | D-158 | C-171 | S-179 | T-207 | I-219 |
| CCA53920 | E-120 | H-154 | A-157 | D-169 | C-182 | E-190 | V-218 | L-231 |
| BAJ28512 | T-120 | H-154 | A-157 | D-169 | C-182 | S-190 | V-218 | V-231 |
| ACL70277 | N-107 | K-141 | A-144 | G-156 | V-169 | F-177 | V-205 | I-217 |
| CBG72797 | E-114 | H-148 | A-151 | D-163 | C-176 | S-184 | V-212 | I-225 |
| AEW05616 | E-107 | E-141 | N-144 | R-156 | C-169 | L-177 | V-205 | I-217 |
| AEB46623 | G-105 | H-139 | A-142 | D-154 | I-167 | T-175 | V-203 | V-214 |
| 1GNX | E-119 | E-153 | A-156 | D-168 | C-181 | S-189 | V-217 | C-230 |
| ACV76621 | G-109 | L-143 | A-146 | D-158 | C-171 | S-179 | G-207 | L-220 |
| ACZ31628 | E-139 | Y-173 | A-176 | D-188 | C-201 | G-209 | T-237 | V-249 |
| ADH67953 | T-107 | Y-141 | A-144 | D-156 | C-169 | V-177 | T-205 | V-216 |
| ADB34290 | E-120 | Y-154 | A-157 | D-169 | C-182 | Y-190 | T-218 | I-231 |
| ADU09106 | G-134 | A-168 | A-171 | D-183 | I-196 | M-204 | V-232 | V-243 |
| CAA82733 | E-119 | E-153 | A-156 | D-168 | C-181 | S-189 | V-217 | C-230 |
| CBG67455 | A-136 | E-170 | A-173 | D-185 | C-198 | S-206 | V-234 | V-247 |
| CAN00920 | G-126 | Y-160 | A-163 | D-175 | C-188 | A-196 | V-224 | F-237 |
| ADX71280 | E-108 | Y-142 | A-145 | D-157 | C-170 | A-178 | A-206 | L-218 |
| ACQ81085 | A-122 | Q-156 | V-159 | D-171 | C-184 | G-192 | I-220 | L-232 |
| 3AHX | E-107 | D-141 | V-144 | D-156 | V-169 | L-177 | V-205 | I-217 |
| ACU35632 | E-118 | H-152 | A-155 | D-167 | C-180 | V-188 | T-216 | F-229 |
| AEV86556 | A-108 | D-142 | A-145 | D-157 | C-170 | E-178 | V-206 | V-218 |
| AEG45006 | A-118 | L-152 | A-155 | D-167 | C-180 | S-188 | V-216 | T-228 |
| BAG18801 | E-120 | L-154 | A-157 | D-169 | C-182 | H-190 | A-218 | L-232 |
| ADI03707 | A-118 | E-152 | A-155 | D-167 | C-180 | E-188 | V-216 | V-227 |
| CAQ00266 | G-126 | Y-160 | A-163 | D-175 | C-188 | A-196 | V-224 | F-237 |
| ADD43929 | A-108 | A-142 | A-145 | D-157 | E-170 | L-178 | T-206 | V-217 |
| ADJ49823 | E-103 | S-137 | A-140 | D-152 | C-165 | S-173 | A-201 | F-214 |
| ABX05062 | G-109 | L-143 | A-146 | E-158 | V-171 | Q-179 | T-207 | I-219 |
| ADL48215 | G-110 | A-144 | A-147 | D-159 | I-172 | M-180 | V-208 | V-219 |
| ACU70272 | S-111 | H-145 | A-148 | D-160 | I-173 | F-181 | V-209 | V-220 |
| ADG88606 | E-116 | K-150 | A-153 | D-165 | C-178 | S-186 | V-214 | I-226 |
| AEW47954 | E-108 | G-142 | A-145 | D-157 | C-170 | S-178 | M-206 | A-219 |
| ACD20223 | R-132 | Y-166 | A-169 | G-181 | C-194 | N-202 | V-230 | V-242 |
| AFC28171 | Q-106 | A-140 | E-143 | D-155 | C-168 | M-176 | V-204 | I-216 |
| ADW03239 | E-119 | L-153 | A-156 | D-168 | C-181 | Y-189 | A-217 | L-231 |
| CBT74727 | E-111 | Y-145 | V-148 | D-160 | C-173 | A-181 | T-209 | I-220 |
| CAM04686 | E-109 | A-143 | A-146 | D-158 | C-171 | S-179 | M-207 | F-220 |
| ACZ20966 | G-112 | E-146 | A-149 | D-161 | C-174 | S-182 | A-210 | V-223 |
| AEV38153 | L-122 | D-157 | V-160 | A-172 | T-185 | L-193 | V-222 | I-234 |
| BAJ26623 | G-108 | H-142 | A-145 | D-157 | V-170 | L-178 | A-206 | V-216 |
| BAL91665 | E-96 | Y-130 | A-133 | D-145 | C-158 | H-166 | A-194 | V-204 |
| ACV09397 | G-110 | Y-144 | A-147 | T-159 | C-172 | S-180 | G-208 | V-221 |
| ADG20157 | G-107 | Y-142 | A-145 | D-157 | C-170 | T-178 | L-206 | L-218 |
| ADC61565 | A-106 | H-140 | A-143 | D-155 | V-168 | D-176 | V-204 | I-215 |
| ACM66669 | E-111 | Y-145 | L-148 | D-160 | C-173 | A-181 | T-209 | I-220 |
| ABD68843 | G-114 | Q-148 | V-151 | D-163 | V-176 | I-184 | L-212 | L-224 |
| ABS61373 | E-107 | M-141 | R-144 | D-156 | C-169 | T-177 | V-205 | I-217 |
| CBA30283 | G-121 | Y-156 | A-159 | D-171 | C-184 | Q-192 | L-220 | L-232 |
| AAA22266 | E-107 | D-141 | A-144 | G-156 | C-169 | L-177 | V-205 | I-217 |
| CAA42814 | L-107 | D-141 | T-144 | D-156 | V-169 | L-177 | V-205 | I-217 |
| ABN51453 | L-130 | D-164 | T-167 | D-179 | V-192 | L-200 | V-228 | I-240 |
| ACZ00292 | G-104 | H-138 | A-141 | D-153 | V-166 | F-174 | V-202 | I-214 |
| AEI12946 | R-113 | E-147 | A-150 | D-162 | C-175 | S-183 | A-211 | I-224 |
| ABS15474 | D-122 | D-156 | A-159 | D-171 | T-184 | S-192 | V-221 | V-233 |
| ADL51094 | E-107 | D-141 | V-144 | D-156 | V-169 | L-177 | V-205 | I-217 |
| AFG34202 | E-107 | L-141 | R-144 | D-156 | C-169 | T-177 | V-205 | V-217 |
| AAN60220 | E-107 | L-141 | R-144 | D-156 | C-169 | T-177 | V-205 | V-217 |

TABLE 9B

| Corresp. | Sequence Name | | | | | | | | |
|---|---|---|---|---|---|---|---|---|---|
| Sequence Pos. | T219 | K231 | D243 | M246 | F292 | S296 | T297 | D302 | H315 |
| SEQ ID NO. | T-219 | K231 | D-243 | M-246 | F-292 | S-296 | T-297 | D-302 | H-315 |
| 379/380 | | | | | | | | | |
| SEQ ID NO. 378 | T-222 | — | D-245 | F-248 | I-293 | S-297 | R-298 | H-303 | H-313 |
| US8101393-0094 | T-219 | K-231 | D-243 | M-246 | F-292 | S-296 | T-297 | D-302 | H-315 |
| US8101393-0388 | T-219 | K-231 | D-243 | M-246 | F-292 | S-296 | T-297 | D-302 | H-315 |
| US8101393-0172 | T-222 | — | D-245 | F-248 | I-292 | S-296 | R-297 | H-302 | R-314 |
| JP2011205992- | V-221 | — | D-244 | V-247 | V-292 | E-296 | R-297 | D-302 | D-316 |
| 0018 | | | | | | | | | |
| JP2011205992- | T-220 | — | D-243 | Q-246 | I-290 | S-294 | R-295 | N-300 | R-312 |
| 0023 | | | | | | | | | |
| JP2011205992- | T-222 | K-234 | D-245 | F-248 | V-293 | S-297 | R-298 | A-303 | Q-317 |
| 0022 | | | | | | | | | |
| US20110214199- | V-222 | R-234 | D-245 | V-248 | L-292 | F-296 | P-297 | D-302 | R-316 |
| 58656 | | | | | | | | | |
| US20110214199- | V-238 | R-250 | D-261 | T-264 | L-308 | F-312 | P-313 | A-318 | R-332 |
| 62406 | | | | | | | | | |
| US20110214199- | T-218 | — | D-241 | F-244 | I-296 | S-300 | R-301 | S-306 | H-320 |
| 47919 | | | | | | | | | |
| US20110214199- | T-217 | — | D-240 | A-243 | V-290 | M-294 | R-295 | A-300 | G-319 |
| 60662 | | | | | | | | | |
| US20110214199- | T-224 | — | D-247 | S-250 | V-297 | F-301 | R-302 | F-307 | D-326 |
| 36660 | | | | | | | | | |
| US20110214199- | S-231 | — | D-254 | A-257 | L-304 | T-308 | P-309 | A-314 | D-340 |
| 17908 | | | | | | | | | |
| US20110214199- | V-217 | — | D-235 | H-238 | V-281 | A-285 | P-286 | P-291 | P-302 |
| 25308 | | | | | | | | | |
| US20110214199- | V-217 | — | D-235 | H-238 | V-281 | A-285 | P-286 | P-291 | P-302 |
| 64004 | | | | | | | | | |
| US20110214199- | A-240 | — | D-263 | R-266 | V-313 | N-317 | P-318 | G-323 | H-346 |
| 25023 | | | | | | | | | |
| US20110214199- | V-217 | — | D-235 | H-238 | V-281 | A-285 | P-286 | P-291 | P-302 |
| 52644 | | | | | | | | | |
| US20110214199- | S-228 | — | D-251 | S-254 | L-301 | T-305 | P-306 | A-311 | D-337 |
| 13862 | | | | | | | | | |
| US20110214199- | T-222 | K-234 | D-245 | A-248 | V-296 | T-300 | R-301 | Y-306 | N-316 |
| 29446 | | | | | | | | | |
| US20110214199- | V-217 | — | D-235 | H-238 | V-281 | A-285 | P-286 | P-291 | P-302 |
| 5988 | | | | | | | | | |
| US20110214199- | V-217 | — | D-235 | H-238 | V-281 | A-285 | P-286 | P-291 | P-302 |
| 23246 | | | | | | | | | |
| US20110214199- | T-220 | D-232 | D-243 | N-246 | I-293 | T-297 | R-298 | N-303 | S-313 |
| 12000 | | | | | | | | | |
| US20110214199- | T-220 | K-232 | D-243 | V-246 | V-291 | T-295 | T-297 | D-302 | Y-311 |
| 56949 | | | | | | | | | |
| US8101393-0272 | T-231 | — | D-254 | G-257 | I-304 | S-308 | P-309 | A-314 | R-328 |
| US8101393-0014 | T-224 | S-236 | D-247 | Y-250 | V-301 | T-305 | R-306 | A-311 | F-323 |
| US8101393-0398 | T-235 | — | D-258 | A-261 | V-308 | S-312 | R-313 | A-318 | E-340 |
| US8101393-0492 | T-235 | — | D-258 | A-261 | V-308 | S-312 | R-313 | A-318 | E-340 |
| US8101393-0400 | T-235 | — | D-258 | A-261 | I-308 | S-312 | R-313 | A-318 | D-340 |
| US8101393-0266 | S-230 | — | D-253 | G-256 | I-303 | T-307 | P-308 | H-313 | M-339 |
| US8101393-0366 | V-215 | — | D-233 | H-236 | V-279 | T-283 | R-284 | R-289 | P-300 |
| US8101393-0342 | T-220 | S-232 | D-243 | F-246 | V-298 | T-302 | R-303 | S-308 | L-322 |
| US8101393-0356 | V-220 | S-232 | H-243 | F-246 | V-291 | S-295 | R-296 | D-301 | N-312 |
| US8101393-0320 | A-220 | K-232 | F-243 | A-246 | F-293 | S-297 | S-298 | Y-303 | S-316 |
| US7314974-19451 | T-216 | S-228 | D-239 | F-242 | I-294 | S-298 | R-299 | S-304 | H-318 |
| US7314974-8251 | A-215 | — | D-238 | R-241 | V-288 | N-292 | P-293 | G-298 | H-321 |
| US7630836-9340 | V-222 | R-234 | D-245 | V-248 | L-292 | F-296 | P-297 | D-302 | R-316 |
| US7630836-12787 | S-231 | — | D-254 | A-257 | L-304 | T-308 | P-309 | A-314 | D-340 |
| US20090220480- | V-218 | S-230 | D-241 | F-244 | I-296 | S-300 | R-301 | S-306 | M-320 |
| 0018 | | | | | | | | | |
| US20120034253- | V-217 | — | D-235 | H-238 | V-281 | A-285 | P-286 | P-291 | P-302 |
| 0080 | | | | | | | | | |
| US20120034253- | V-217 | — | D-235 | H-238 | V-281 | A-285 | P-286 | P-291 | P-302 |
| 0077 | | | | | | | | | |
| US20120034253- | V-217 | — | D-235 | H-238 | V-281 | A-285 | P-286 | P-291 | P-302 |
| 0078 | | | | | | | | | |
| WO2012016960- | T-247 | — | D-271 | A-274 | I-321 | N-325 | P-326 | A-331 | G-346 |
| 11369 | | | | | | | | | |
| US20120015408- | T-222 | K-234 | D-245 | A-248 | V-296 | T-300 | R-301 | Y-306 | N-316 |
| 0002 | | | | | | | | | |
| US20120015408- | T-222 | K-234 | D-245 | A-248 | V-296 | T-300 | R-301 | Y-306 | N-316 |
| 0004 | | | | | | | | | |
| US20120015408- | T-222 | K-234 | D-245 | A-248 | V-296 | T-300 | R-301 | Y-306 | N-316 |
| 0006 | | | | | | | | | |
| US20120015408- | T-222 | K-234 | D-245 | A-248 | V-296 | T-300 | R-301 | Y-306 | N-316 |
| 0008 | | | | | | | | | |
| US20120015408- | T-222 | K-234 | D-245 | A-248 | V-296 | T-300 | R-301 | Y-306 | N-316 |
| 0010 | | | | | | | | | |
| US20120015408- | T-222 | K-234 | D-245 | A-248 | V-296 | T-300 | R-301 | Y-306 | N-316 |
| 0012 | | | | | | | | | |
| US20120015408- | T-222 | K-234 | D-245 | A-248 | V-296 | T-300 | R-301 | Y-306 | N-316 |
| 0014 | | | | | | | | | |
| US20120015408- | T-222 | K-234 | D-245 | A-248 | V-296 | T-300 | R-301 | Y-306 | N-316 |
| 0016 | | | | | | | | | |
| US20120015408- | T-222 | K-234 | D-245 | A-248 | V-296 | T-300 | R-301 | Y-306 | N-316 |
| 0018 | | | | | | | | | |
| US20120015408- | T-222 | K-234 | D-245 | A-248 | V-296 | T-300 | R-301 | Y-306 | N-316 |
| 0020 | | | | | | | | | |
| US20120015408- | T-222 | K-234 | D-245 | A-248 | V-296 | T-300 | R-301 | Y-306 | N-316 |
| 0022 | | | | | | | | | |
| US20120015408- | T-222 | K-234 | D-245 | A-248 | V-296 | T-300 | R-301 | Y-306 | N-316 |
| 0026 | | | | | | | | | |
| US20120015408- | T-222 | K-234 | D-245 | A-248 | V-296 | T-300 | R-301 | Y-306 | N-316 |
| 0028 | | | | | | | | | |
| US20120015408- | T-222 | K-234 | D-245 | A-248 | V-296 | T-300 | R-301 | Y-306 | N-316 |
| 0030 | | | | | | | | | |
| US20120015408- | T-222 | K-234 | D-245 | A-248 | V-296 | T-300 | R-301 | Y-306 | N-316 |
| 0032 | | | | | | | | | |
| US20120015408- | T-222 | K-234 | D-245 | A-248 | V-296 | T-300 | R-301 | Y-306 | N-316 |
| 0034 | | | | | | | | | |
| US20120015408- | T-222 | K-234 | D-245 | A-248 | V-296 | T-300 | R-301 | Y-306 | N-316 |
| 0036 | | | | | | | | | |
| US20120015408- | T-222 | K-234 | D-245 | A-248 | V-296 | T-300 | R-301 | Y-306 | N-316 |
| 0038 | | | | | | | | | |
| US20120015408- | T-222 | K-234 | D-245 | A-248 | V-296 | T-300 | R-301 | Y-306 | N-316 |
| 0040 | | | | | | | | | |
| US20120015408- | T-222 | K-234 | D-245 | A-248 | V-296 | T-300 | R-301 | Y-306 | N-316 |
| 0042 | | | | | | | | | |
| US20120015408- | T-222 | K-234 | D-245 | A-248 | V-296 | T-300 | R-301 | Y-306 | N-316 |
| 0044 | | | | | | | | | |
| US20120015408- | T-222 | K-234 | D-245 | A-248 | V-296 | T-300 | R-301 | Y-306 | N-316 |
| 0046 | | | | | | | | | |
| US20120015408- | T-222 | K-234 | D-245 | A-248 | V-296 | T-300 | R-301 | Y-306 | N-316 |
| 0048 | | | | | | | | | |
| US20120015408- | T-222 | K-234 | D-245 | A-248 | V-296 | T-300 | R-301 | Y-306 | N-316 |
| 0050 | | | | | | | | | |
| US20120015408- | T-222 | K-234 | D-245 | A-248 | V-296 | T-300 | R-301 | Y-306 | N-316 |
| 0052 | | | | | | | | | |
| US20120015408- | T-222 | K-234 | D-245 | A-248 | V-296 | T-300 | R-301 | Y-306 | N-316 |
| 0054 | | | | | | | | | |
| US20120015408- | T-222 | K-234 | D-245 | A-248 | V-296 | T-300 | R-301 | Y-306 | N-316 |
| 0056 | | | | | | | | | |
| US20120015408- | T-222 | K-234 | D-245 | A-248 | V-296 | T-300 | R-301 | Y-306 | N-316 |
| 0058 | | | | | | | | | |
| US20120015408- | T-222 | K-234 | D-245 | A-248 | V-296 | T-300 | R-301 | Y-306 | N-316 |
| 0060 | | | | | | | | | |
| US20120015408- | T-222 | K-234 | D-245 | A-248 | V-296 | T-300 | R-301 | Y-306 | N-316 |
| 0062 | | | | | | | | | |
| US20120015408- | T-222 | K-234 | D-245 | A-248 | V-296 | T-300 | R-301 | Y-306 | N-316 |
| 0064 | | | | | | | | | |
| US20120015408- | T-222 | K-234 | D-245 | A-248 | V-296 | T-300 | R-301 | Y-306 | N-316 |
| 0066 | | | | | | | | | |
| US20120015408- | T-222 | K-234 | D-245 | A-248 | V-296 | T-300 | R-301 | Y-306 | N-316 |
| 0068 | | | | | | | | | |
| US20120015408- | T-222 | K-234 | D-245 | A-248 | V-296 | T-300 | R-301 | Y-306 | N-316 |
| 0070 | | | | | | | | | |
| US20120015408- | T-222 | K-234 | D-245 | A-248 | V-296 | T-300 | R-301 | Y-306 | N-316 |
| 0072 | | | | | | | | | |
| US20120015408- | T-222 | K-234 | D-245 | A-248 | V-296 | T-300 | R-301 | Y-306 | N-316 |
| 0074 | | | | | | | | | |
| US20120015408- | T-222 | K-234 | D-245 | A-248 | V-296 | T-300 | R-301 | Y-306 | N-316 |
| 0076 | | | | | | | | | |
| US20120015408- | T-222 | K-234 | D-245 | A-248 | V-296 | T-300 | R-301 | Y-306 | N-316 |
| 0078 | | | | | | | | | |
| US20120015408- | T-222 | K-234 | D-245 | A-248 | V-296 | T-300 | R-301 | Y-306 | N-316 |
| 0080 | | | | | | | | | |
| US20120015408- | T-222 | K-234 | D-245 | A-248 | V-296 | T-300 | R-301 | Y-306 | N-316 |
| 0082 | | | | | | | | | |
| US20120015408- | A-222 | K-234 | D-245 | A-248 | V-296 | T-300 | R-301 | Y-306 | N-316 |
| 0086 | | | | | | | | | |
| US20120015408- | T-222 | K-234 | D-245 | A-248 | V-296 | T-300 | R-301 | Y-306 | N-316 |
| 0084 | | | | | | | | | |
| US20120015408- | T-222 | K-234 | D-245 | A-248 | V-296 | T-300 | R-301 | Y-306 | N-316 |
| 0088 | | | | | | | | | |
| US20120015408- | T-222 | K-234 | D-245 | A-248 | V-296 | T-300 | R-301 | Y-306 | N-316 |
| 0090 | | | | | | | | | |
| US20120015408- | T-222 | K-234 | D-245 | A-248 | V-296 | T-300 | R-301 | Y-306 | N-316 |
| 0092 | | | | | | | | | |
| US20120015408- | T-222 | K-234 | D-245 | A-248 | V-296 | T-300 | R-301 | Y-306 | N-316 |
| 0094 | | | | | | | | | |
| US20120015408- | T-222 | K-234 | D-245 | A-248 | V-296 | T-300 | R-301 | Y-306 | N-316 |
| 0096 | | | | | | | | | |
| US20120015408- | T-222 | K-234 | D-245 | A-248 | V-296 | T-300 | R-301 | Y-306 | N-316 |
| 0098 | | | | | | | | | |
| US20120015408- | T-222 | K-234 | D-245 | A-248 | V-296 | T-300 | R-301 | Y-306 | N-316 |
| 0100 | | | | | | | | | |
| US20120015408- | T-222 | K-234 | D-245 | A-248 | V-296 | T-300 | R-301 | Y-306 | N-316 |
| 0102 | | | | | | | | | |
| US20120015408- | T-222 | K-234 | D-245 | A-248 | V-296 | T-300 | R-301 | Y-306 | N-316 |
| 0104 | | | | | | | | | |
| US20120015408- | T-222 | K-234 | D-245 | A-248 | V-296 | T-300 | R-301 | Y-306 | N-316 |
| 0106 | | | | | | | | | |
| US20120015408- | T-222 | K-234 | D-245 | A-248 | V-296 | T-300 | R-301 | Y-306 | N-316 |
| 0108 | | | | | | | | | |
| US20120015408- | T-222 | K-234 | D-245 | A-248 | V-296 | T-300 | R-301 | Y-306 | N-316 |
| 0110 | | | | | | | | | |
| US20120015408- | T-222 | K-234 | D-245 | A-248 | V-296 | T-300 | R-301 | Y-306 | N-316 |
| 0112 | | | | | | | | | |
| US20120015408- | T-222 | K-234 | D-245 | A-248 | V-296 | T-300 | R-301 | Y-306 | N-316 |
| 0114 | | | | | | | | | |
| US20120015408- | T-222 | K-234 | D-245 | A-248 | V-296 | T-300 | R-301 | Y-306 | N-316 |
| 0116 | | | | | | | | | |
| US20120015408- | T-222 | K-234 | D-245 | A-248 | V-296 | T-300 | R-301 | Y-306 | N-316 |
| 0118 | | | | | | | | | |
| US20120015408- | T-222 | K-234 | D-245 | A-248 | V-296 | T-300 | R-301 | Y-306 | N-316 |
| 0120 | | | | | | | | | |
| US20120015408- | T-222 | K-234 | D-245 | A-248 | V-296 | T-300 | R-301 | Y-306 | N-316 |
| 0122 | | | | | | | | | |
| US20120015408- | T-222 | K-234 | D-245 | A-248 | V-296 | T-300 | R-301 | Y-306 | N-316 |
| 0124 | | | | | | | | | |
| US8202716-0464 | T-220 | N-232 | D-243 | Q-246 | V-294 | T-298 | R-299 | D-304 | H-315 |
| US20110262988- | A-220 | K-232 | F-243 | A-246 | F-293 | S-297 | S-298 | Y-303 | S-316 |
| 0002 | | | | | | | | | |
| US20110262988- | A-243 | K-255 | F-266 | A-269 | F-316 | S-320 | S-321 | Y-326 | S-339 |
| 0003 | | | | | | | | | |
| US20110151538- | A-272 | K-284 | F-295 | A-298 | F-345 | S-349 | S-350 | Y-355 | S-368 |
| 0130 | | | | | | | | | |
| US20100003234- | T-221 | E-232 | D-244 | M-247 | I-294 | T-298 | R-299 | A-304 | P-315 |
| 0048 | | | | | | | | | |
| US6184018-0012 | A-220 | K-232 | F-243 | A-246 | F-293 | S-297 | S-298 | Y-303 | S-316 |
| US6377893-0063 | A-215 | K-227 | F-238 | A-241 | F-288 | S-292 | S-293 | Y-298 | S-311 |
| ACJ34717 | T-230 | K-242 | D-254 | M-257 | F-303 | S-307 | T-308 | D-313 | H-326 |
| ADD27066 | T-220 | — | D-243 | Q-246 | I-290 | S-294 | R-295 | N-300 | R-312 |
| ACZ42845 | T-227 | S-239 | D-250 | M-253 | V-298 | S-302 | P-303 | H-308 | R-321 |
| ABQ91969 | T-219 | S-231 | D-242 | F-245 | V-292 | S-296 | R-297 | D-302 | R-315 |
| ABU56651 | T-219 | S-231 | D-242 | F-245 | V-292 | S-296 | R-297 | D-302 | R-315 |
| AEY92801 | V-224 | R-236 | D-247 | V-250 | L-294 | F-298 | P-299 | D-304 | R-318 |
| CAD55382 | V-238 | R-250 | D-261 | T-264 | L-308 | F-312 | P-313 | A-318 | R-332 |
| AD073143 | T-220 | S-232 | D-243 | F-246 | I-298 | N-302 | R-303 | S-308 | F-322 |
| CCA60311 | T-231 | — | D-254 | G-257 | I-304 | S-308 | P-309 | A-314 | R-328 |
| ADI15206 | V-231 | A-243 | D-254 | F-257 | V-302 | S-306 | R-307 | H-312 | P-323 |
| ADI12494 | V-224 | R-236 | D-247 | T-250 | L-294 | F-298 | P-299 | D-304 | R-318 |
| ACU35736 | T-219 | — | D-243 | Q-246 | V-293 | T-297 | E-298 | S-303 | H-327 |
| BAC69512 | V-222 | R-234 | D-245 | V-248 | L-292 | F-296 | P-297 | D-302 | R-316 |
| AEN08263 | V-224 | R-236 | D-247 | T-250 | L-294 | F-298 | P-299 | D-304 | V-318 |
| CCA53915 | V-248 | R-260 | D-271 | T-274 | L-318 | F-322 | P-323 | D-328 | L-342 |
| CAJ88063 | V-224 | R-236 | D-247 | T-250 | L-294 | F-298 | P-299 | D-304 | L-318 |
| ABF87202 | T-218 | S-230 | D-241 | F-244 | I-296 | S-300 | R-301 | S-306 | H-320 |
| BAJ30040 | V-221 | S-233 | D-244 | I-247 | L-291 | F-295 | R-296 | D-301 | G-315 |
| ACO44852 | V-222 | S-234 | D-245 | A-248 | V-293 | T-297 | R-298 | A-303 | P-309 |
| AFO59750 | T-223 | — | D-246 | M-249 | V-296 | S-300 | R-301 | A-306 | D-321 |
| BAJ31549 | T-246 | — | D-269 | A-272 | I-319 | T-323 | P-324 | A-329 | H-354 |
| ACY97307 | A-236 | — | D-259 | Q-262 | I-309 | T-313 | R-314 | G-319 | H-343 |
| ACM06095 | T-220 | Q-232 | D-243 | L-246 | I-290 | A-294 | P-295 | A-300 | E-314 |
| AEI64652 | T-218 | S-230 | D-241 | F-244 | I-296 | S-300 | R-301 | S-306 | H-320 |
| BAG17581 | V-238 | S-250 | D-261 | I-264 | L-308 | F-312 | R-313 | A-318 | V-332 |
| AEM83530 | V-224 | R-236 | D-247 | T-250 | L-294 | F-298 | P-299 | D-304 | R-318 |
| ADG89307 | T-227 | A-239 | D-250 | V-253 | V-300 | Y-304 | R-305 | A-310 | V-332 |
| ABG04991 | T-217 | — | D-240 | A-243 | V-290 | M-294 | R-295 | A-300 | G-319 |
| ABP54026 | T-236 | — | D-259 | A-262 | I-309 | S-313 | R-314 | A-319 | D-341 |
| ABV97405 | T-236 | — | D-259 | A-262 | I-309 | S-313 | R-314 | A-319 | H-341 |
| ADH60167 | T-219 | K-231 | D-242 | S-245 | V-293 | T-297 | R-298 | Y-303 | N-313 |
| ADV80493 | T-219 | K-231 | D-242 | A-245 | V-293 | T-297 | R-298 | Y-303 | N-313 |
| AEM77729 | T-219 | K-231 | D-242 | S-245 | V-293 | T-297 | R-298 | Y-303 | N-313 |
| ABK71329 | T-224 | — | D-247 | S-250 | V-297 | F-301 | R-302 | F-307 | D-326 |
| ACZ89864 | V-231 | V-243 | D-262 | L-265 | I-312 | N-316 | P-317 | S-322 | D-337 |
| BAC72965 | S-231 | — | D-254 | A-257 | L-304 | T-308 | P-309 | A-314 | D-340 |
| ADD25173 | T-220 | K-232 | D-243 | A-246 | V-294 | T-298 | R-299 | Y-304 | N-314 |
| ABF44291 | V-230 | R-242 | D-253 | F-256 | V-301 | S-305 | R-306 | A-311 | P-317 |
| AEY93261 | T-226 | S-238 | D-249 | H-252 | I-300 | R-304 | P-305 | D-310 | G-332 |
| 1NP2 | V-217 | — | D-235 | H-238 | V-281 | A-285 | P-286 | P-291 | P-302 |
| AEG34643 | V-217 | — | D-235 | H-238 | V-281 | A-285 | P-286 | P-291 | P-302 |
| AFR07907 | A-221 | — | D-244 | R-247 | V-294 | T-298 | P-299 | G-304 | E-327 |
| AEB43702 | T-235 | — | D-258 | A-261 | V-308 | S-312 | R-313 | A-318 | D-340 |
| BAL92882 | T-232 | — | D-256 | A-259 | I-306 | T-310 | P-311 | A-316 | G-331 |
| CCA59876 | S-230 | — | D-253 | G-256 | I-303 | T-307 | P-308 | H-313 | M-339 |
| ACU74192 | T-221 | — | D-244 | Q-247 | I-294 | N-298 | P-299 | A-304 | G-332 |
| ABV96319 | T-219 | — | D-243 | Q-246 | V-293 | T-297 | P-298 | G-303 | G-319 |
| AF053528 | T-232 | — | D-255 | A-258 | V-305 | T-309 | P-310 | E-315 | Q-340 |
| AFH40090 | V-217 | — | D-235 | H-238 | V-281 | A-285 | P-286 | P-291 | P-302 |
| ADL49193 | T-219 | — | D-243 | H-246 | L-293 | A-297 | P-298 | G-303 | G-318 |
| AFE08200 | T-218 | S-230 | D-241 | F-244 | V-296 | S-300 | R-301 | S-306 | F-320 |
| AAN05441 | V-217 | — | D-235 | H-238 | V-281 | A-285 | P-286 | P-291 | P-302 |
| CAJ90043 | T-220 | S-232 | D-243 | H-246 | V-294 | R-298 | P-299 | G-304 | R-326 |
| AEY89575 | S-224 | — | D-247 | A-250 | L-297 | T-301 | P-302 | A-307 | D-333 |
| AAF37730 | A-240 | — | D-263 | R-266 | V-313 | N-317 | P-318 | G-323 | H-346 |
| BAL98072 | T-220 | T-232 | D-243 | F-246 | V-298 | S-302 | R-303 | A-308 | P-320 |
| AAN05440 | V-217 | — | D-235 | H-238 | V-281 | A-285 | P-286 | P-291 | P-302 |
| AEM77895 | T-219 | K-231 | D-242 | S-245 | V-293 | T-297 | R-298 | Y-303 | N-313 |
| ADB34272 | T-227 | — | D-250 | Q-253 | V-300 | S-304 | R-305 | G-310 | H-335 |
| ABW87307 | V-217 | — | D-235 | H-238 | V-281 | A-285 | P-286 | P-291 | P-302 |
| AF322365 1 | V-217 | — | D-235 | H-238 | V-281 | A-285 | P-286 | P-291 | P-302 |
| CAC10107 | S-228 | — | D-251 | S-254 | L-301 | T-305 | P-306 | A-311 | D-337 |
| AEB47478 | T-219 | — | D-243 | H-246 | I-293 | A-297 | P-298 | G-303 | A-319 |
| ADL45220 | T-235 | — | D-258 | A-261 | V-308 | S-312 | R-313 | A-318 | D-340 |
| ABK51908 | T-233 | — | D-256 | Q-259 | V-306 | N-310 | P-311 | H-316 | D-341 |
| CAN94460 | T-221 | S-233 | D-244 | F-247 | L-299 | S-303 | R-304 | S-309 | H-323 |
| AEF18219 | T-218 | K-230 | D-241 | S-244 | I-292 | S-296 | R-297 | Y-302 | A-312 |
| ADD39191 | G-242 | — | D-265 | A-268 | L-315 | T-319 | P-320 | A-325 | H-351 |
| ABP52811 | T-219 | — | D-243 | H-246 | V-293 | A-297 | P-298 | G-303 | G-319 |
| AEV88819 | T-247 | — | D-271 | A-274 | I-321 | N-325 | P-326 | A-331 | G-346 |
| AEY89570 | T-233 | — | D-256 | G-259 | V-307 | S-311 | P-312 | L-317 | H-343 |
| ADD01635 | T-219 | K-231 | D-242 | S-245 | V-293 | T-297 | R-298 | Y-303 | N-313 |
| CAB95278 | T-220 | S-232 | D-243 | H-246 | V-294 | R-298 | P-299 | D-304 | R-326 |
| AEN13042 | T-220 | S-232 | D-243 | H-246 | I-294 | R-298 | P-299 | A-304 | S-326 |
| ACY97750 | T-222 | — | D-243 | A-246 | V-293 | A-297 | P-298 | R-303 | E-329 |
| ADI10010 | S-220 | — | D-243 | A-246 | I-293 | T-297 | P-298 | A-303 | R-329 |
| CCB72805 | C-228 | — | D-251 | G-254 | V-301 | T-305 | P-306 | A-311 | R-337 |
| ACY14034 | T-233 | — | D-256 | G-259 | I-306 | F-310 | G-311 | G-316 | R-333 |
| AAZ55664 | T-222 | S-234 | E-245 | H-248 | I-295 | R-299 | P-300 | D-305 | R-327 |
| ADW02698 | T-220 | S-232 | D-243 | H-246 | I-294 | R-298 | P-299 | A-304 | Q-326 |
| ABC33525 | V-219 | E-231 | D-243 | N-246 | V-291 | T-295 | R-296 | Q-301 | A-310 |
| ADB34282 | V-222 | S-234 | D-245 | I-248 | L-292 | F-296 | R-297 | A-302 | G-316 |
| AAM23648 | T-222 | K-234 | D-245 | A-248 | V-296 | T-300 | R-301 | Y-306 | N-316 |
| CCH86028 | T-229 | — | D-252 | Q-255 | V-302 | F-306 | R-307 | A-312 | Q-330 |
| ADV67544 | V-227 | R-239 | D-250 | F-253 | V-298 | S-302 | R-303 | A-308 | P-314 |
| ACZ89862 | T-232 | — | D-250 | Q-253 | V-300 | H-304 | P-305 | A-310 | G-325 |
| ADH66252 | A-221 | — | D-244 | R-247 | V-294 | S-298 | P-299 | A-304 | E-327 |
| ADV80605 | T-219 | K-231 | D-242 | A-245 | V-293 | T-297 | R-298 | Y-303 | N-313 |
| ADW05507 | T-233 | — | D-256 | G-259 | I-307 | T-311 | P-312 | T-317 | H-343 |
| BAA86923 | V-217 | — | D-235 | H-238 | V-281 | A-285 | P-286 | P-291 | P-302 |
| AAN05438 | V-217 | — | D-235 | H-238 | V-281 | A-285 | P-286 | P-291 | P-302 |
| CAC16438 | T-233 | — | D-256 | A-259 | V-306 | T-310 | P-311 | E-316 | R-341 |
| CAJ89567 | T-233 | — | D-256 | A-259 | V-306 | T-310 | P-311 | E-316 | R-341 |
| AFD27167 | V-238 | A-250 | D-261 | A-264 | V-309 | S-313 | R-314 | E-319 | P-325 |
| BAG20044 | T-240 | — | D-263 | A-266 | I-313 | S-317 | P-318 | A-323 | R-337 |
| ACU71435 | T-223 | — | D-246 | H-249 | V-296 | R-300 | S-301 | G-306 | R-323 |
| ADG87563 | T-254 | — | D-275 | A-278 | V-325 | S-329 | P-330 | A-335 | G-350 |
| ABI35984 | V-217 | — | D-235 | H-238 | V-281 | A-285 | P-286 | P-291 | P-302 |
| CAB42553 | V-217 | — | D-235 | H-238 | V-281 | A-285 | P-286 | P-291 | P-302 |
| 1UG6 | V-217 | — | D-235 | H-238 | V-281 | A-285 | P-286 | P-291 | P-302 |
| CAA91220 | T-222 | K-234 | D-245 | A-248 | V-296 | T-300 | R-301 | Y-306 | N-316 |
| AFK85369 | T-218 | R-230 | D-241 | S-244 | I-292 | S-296 | R-297 | Y-302 | G-312 |
| AEN10177 | T-234 | — | D-257 | G-260 | I-308 | T-312 | P-313 | T-318 | H-344 |
| AEM87460 | S-220 | — | D-243 | A-246 | I-293 | T-297 | P-298 | A-303 | Q-330 |
| AAZ81839 | T-220 | N-232 | D-243 | Q-246 | V-294 | T-298 | R-299 | D-304 | H-315 |
| ADU50085 | T-242 | A-254 | D-266 | M-269 | V-316 | N-320 | G-321 | H-326 | D-351 |
| AEK47062 | T-233 | — | D-256 | G-259 | V-306 | F-310 | G-311 | G-316 | R-333 |
| ABD68852 | A-232 | S-244 | D-255 | R-258 | V-303 | F-307 | P-308 | D-313 | S-327 |
| ACL38401 | T-221 | G-233 | D-245 | F-248 | V-295 | H-299 | G-300 | K-305 | D-337 |
| ABS05424 | T-238 | — | D-261 | Q-264 | V-311 | S-315 | P-316 | A-321 | D-347 |
| AEK43773 | T-215 | — | D-239 | Q-242 | V-289 | R-293 | D-294 | G-299 | D-317 |
| AEV87561 | A-207 | — | D-230 | A-233 | V-280 | F-284 | G-285 | G-290 | R-307 |
| ACZ86244 | S-229 | — | D-252 | Q-255 | I-300 | S-304 | R-305 | G-310 | D-334 |
| AEB46173 | T-220 | — | D-243 | A-246 | V-293 | S-297 | T-298 | A-303 | Q-329 |
| BAG21567 | T-235 | — | D-258 | G-261 | V-309 | T-313 | P-314 | T-319 | H-345 |
| ABX05041 | T-220 | S-232 | D-243 | F-246 | V-297 | S-301 | R-302 | D-307 | S-318 |
| AFR09943 | T-241 | S-253 | E-264 | H-267 | L-314 | R-318 | P-319 | D-324 | P-344 |
| ACZ89285 | T-228 | S-240 | D-251 | V-254 | V-301 | Y-305 | P-306 | A-311 | A-333 |
| ACV58907 | T-217 | N-229 | D-240 | Q-243 | V-291 | T-295 | R-296 | D-301 | H-312 |
| ADG89462 | T-211 | S-223 | D-234 | H-237 | I-279 | T-283 | P-284 | G-289 | E-301 |
| ADU09756 | T-238 | T-250 | D-261 | L-264 | V-311 | Y-315 | R-316 | D-321 | R-343 |
| ACZ90607 | T-211 | — | D-234 | H-237 | I-280 | N-284 | P-285 | A-290 | G-302 |
| ADG73989 | T-227 | — | D-250 | A-253 | V-300 | S-304 | T-305 | H-310 | N-338 |
| AEG45154 | T-251 | S-263 | D-275 | F-278 | V-325 | N-329 | G-330 | A-335 | D-373 |
| AEJ43907 | T-217 | S-229 | D-240 | Q-243 | V-291 | T-295 | R-296 | D-301 | H-312 |
| ACZ20790 | T-236 | T-248 | D-260 | F-263 | V-314 | H-318 | G-319 | K-324 | D-351 |
| CCB77455 | A-225 | A-237 | D-248 | H-251 | I-297 | N-301 | P-302 | A-307 | P-320 |
| ADL46625 | T-235 | — | D-258 | A-261 | V-308 | F-312 | G-313 | G-318 | R-335 |
| ADU10772 | T-235 | — | D-258 | A-261 | V-308 | F-312 | G-313 | G-318 | R-335 |
| ADD45899 | G-222 | — | D-245 | Q-248 | V-295 | S-299 | R-300 | G-305 | H-329 |
| CCA53920 | T-234 | — | D-257 | G-260 | V-307 | R-311 | S-312 | G-317 | R-334 |
| BAJ28512 | S-234 | — | E-257 | G-260 | L-308 | N-312 | P-313 | A-318 | D-348 |
| ACL70277 | T-220 | — | D-243 | I-246 | I-293 | S-297 | R-298 | H-303 | V-314 |
| CBG72797 | S-228 | — | D-251 | A-254 | L-301 | T-305 | P-306 | A-311 | D-337 |
| AEW05616 | T-220 | Q-232 | D-243 | A-246 | V-294 | T-298 | R-299 | D-304 | Y-315 |
| AEB46623 | A-217 | G-229 | E-240 | H-243 | V-284 | N-288 | P-289 | A-294 | P-307 |
| 1GNX | T-233 | — | D-256 | A-259 | V-306 | S-310 | P-311 | E-316 | R-341 |
| ACV76621 | T-223 | — | D-247 | G-250 | I-297 | S-301 | T-302 | R-307 | D-333 |
| ACZ31628 | T-252 | — | D-276 | F-279 | V-326 | N-330 | G-331 | G-336 | E-371 |
| ADH67953 | T-219 | S-231 | R-242 | H-245 | V-292 | R-296 | P-297 | D-302 | R-324 |
| ADB34290 | T-234 | — | D-257 | G-260 | I-307 | F-311 | S-312 | G-317 | R-334 |
| ADU09106 | A-246 | T-258 | D-269 | H-272 | V-313 | N-317 | P-318 | A-323 | P-336 |
| CAA82733 | T-233 | — | D-256 | A-259 | V-306 | S-310 | P-311 | E-316 | R-341 |
| CBG67455 | T-250 | — | D-273 | A-276 | V-323 | S-327 | P-328 | E-333 | R-358 |
| CAN00920 | T-240 | — | G-261 | G-264 | V-311 | N-315 | T-316 | M-321 | D-347 |
| ADX71280 | T-221 | — | D-245 | F-248 | V-295 | H-299 | G-300 | K-305 | D-335 |
| ACQ81085 | T-235 | — | D-259 | Q-262 | V-308 | T-312 | A-313 | A-318 | D-356 |
| 3AHX | T-220 | — | D-243 | N-246 | I-293 | T-297 | R-298 | N-303 | S-313 |
| ACU35632 | T-232 | — | D-255 | G-258 | I-305 | T-309 | S-310 | G-315 | R-332 |
| AEV86556 | T-221 | S-233 | D-244 | I-247 | V-294 | Y-298 | R-299 | D-304 | A-326 |
| AEG45006 | T-231 | — | D-255 | A-258 | V-305 | S-309 | T-310 | K-315 | D-341 |
| BAG18801 | T-235 | — | D-258 | G-261 | V-308 | R-312 | G-313 | G-318 | R-335 |
| ADI03707 | T-230 | S-242 | E-253 | H-256 | L-303 | R-307 | P-308 | D-313 | D-335 |
| CAQ00266 | T-240 | — | D-261 | G-264 | V-311 | N-315 | T-316 | M-321 | D-347 |
| ADD43929 | T-220 | S-232 | D-243 | H-246 | V-290 | A-294 | P-295 | A-300 | E-312 |
| ADJ49823 | A-217 | — | D-240 | H-243 | V-292 | A-296 | P-297 | P-302 | R-318 |
| ABX05062 | T-222 | — | D-245 | G-248 | I-297 | F-301 | P-302 | A-307 | V-317 |
| ADL48215 | A-222 | T-234 | D-245 | H-248 | V-289 | N-293 | P-294 | A-299 | P-312 |
| ACU70272 | A-223 | A-235 | D-246 | H-249 | V-295 | N-299 | P-300 | A-305 | P-318 |
| ADG88606 | C-229 | — | D-252 | Q-255 | I-302 | S-306 | R-307 | G-312 | H-336 |
| AEW47954 | T-222 | S-234 | I-245 | N-248 | L-293 | T-297 | P-298 | A-303 | R-314 |
| ACD20223 | V-245 | S-257 | E-268 | H-271 | I-316 | F-320 | R-321 | S-326 | P-336 |
| AFC28171 | T-219 | S-231 | D-242 | T-245 | I-293 | T-297 | R-298 | A-303 | H-314 |
| ADW03239 | T-234 | — | D-257 | G-260 | V-307 | R-311 | G-312 | G-317 | R-334 |
| CBT74727 | T-223 | T-235 | D-247 | W-250 | V-297 | H-301 | D-302 | G-307 | E-333 |
| CAM04686 | A-223 | — | D-246 | H-249 | V-297 | A-301 | P-302 | P-307 | R-323 |
| ACZ20966 | T-226 | — | D-250 | A-253 | V-300 | S-304 | T-305 | H-310 | D-336 |
| AEV38153 | V-237 | A-249 | E-260 | Q-263 | I-308 | R-312 | R-313 | D-318 | R-329 |
| BAJ26623 | A-219 | A-231 | D-242 | H-245 | V-292 | N-296 | P-297 | A-302 | P-314 |
| BAL91665 | A-207 | — | D-230 | G-233 | V-280 | F-284 | G-285 | G-290 | R-307 |
| ACV09397 | T-224 | — | D-248 | A-251 | V-298 | S-302 | T-303 | E-308 | D-334 |
| ADG20157 | V-221 | D-232 | Y-244 | F-247 | I-294 | T-298 | R-299 | A-304 | G-312 |
| ADC61565 | A-218 | — | D-241 | I-244 | V-289 | S-293 | R-294 | A-299 | D-307 |
| ACM66669 | T-223 | G-235 | D-247 | W-250 | V-297 | H-301 | D-302 | G-307 | E-333 |
| ABD68843 | V-227 | D-238 | D-250 | G-253 | I-298 | M-302 | R-303 | A-308 | S-317 |
| ABS61373 | T-220 | R-232 | D-243 | I-246 | V-291 | T-295 | T-297 | D-302 | Y-311 |
| CBA30283 | V-235 | D-246 | Y-258 | F-261 | I-303 | T-307 | R-308 | T-313 | N-322 |
| AAA22266 | A-220 | T-232 | N-243 | S-246 | I-293 | T-297 | S-298 | Y-303 | A-316 |
| CAA42814 | A-220 | K-232 | F-243 | A-246 | F-293 | S-297 | S-298 | Y-303 | S-316 |
| ABN51453 | A-243 | K-255 | F-266 | A-269 | F-316 | S-320 | S-321 | Y-326 | S-339 |
| ACZ00292 | A-217 | S-229 | D-241 | M-244 | V-289 | Q-293 | P-294 | A-299 | P-312 |
| AEI12946 | T-227 | — | D-250 | A-253 | V-300 | A-304 | T-305 | H-310 | Q-338 |
| ABS15474 | V-236 | D-248 | D-259 | Q-262 | V-307 | R-311 | R-312 | A-317 | R-328 |
| ADL51094 | T-220 | D-232 | D-243 | N-246 | I-293 | T-297 | R-298 | N-303 | S-313 |
| AFG34202 | T-220 | K-232 | D-243 | V-246 | V-291 | T-295 | T-297 | D-302 | Y-311 |
| AAN60220 | T-220 | K-232 | D-243 | V-246 | V-291 | T-295 | T-297 | D-302 | Y-311 |

| Corresp. | Sequence Name | | | | | | | |
|---|---|---|---|---|---|---|---|---|
| Sequence Pos. | S317 | M325 | N326 | N332 | E365 | Q366 | I378 | Y399 |
| SEQ ID NO. | S-317 | M-325 | N-326 | N-332 | E-365 | Q-366 | I-378 | Y-399 |
| 379/380 | | | | | | | | |
| SEQ ID NO. 378 | R-315 | M-323 | N-324 | D-330 | D-363 | D-364 | Y-376 | F-397 |
| US8101393-0094 | S-317 | M-325 | N-326 | N-332 | E-365 | Q-366 | I-378 | Y-399 |
| US8101393-0388 | S-317 | M-325 | N-326 | N-332 | E-365 | Q-366 | I-378 | Y-399 |
| US8101393-0172 | — | M-322 | N-323 | D-329 | D-362 | D-363 | Y-375 | F-396 |
| JP2011205992- | — | A-323 | D-324 | E-330 | E-363 | D-364 | F-376 | F-397 |
| 0018 | | | | | | | | |
| JP2011205992- | — | M-320 | D-321 | E-327 | D-360 | D-361 | F-373 | F-394 |
| 0023 | | | | | | | | |
| JP2011205992- | — | M-325 | G-326 | R-332 | P-365 | E-366 | L-378 | F-399 |
| 0022 | | | | | | | | |
| US20110214199- | — | M-324 | D-325 | T-331 | P-364 | D-365 | L-377 | F-398 |
| 58656 | | | | | | | | |
| US20110214199- | — | M-340 | D-341 | G-347 | P-380 | D-381 | L-393 | F-414 |
| 62406 | | | | | | | | |
| US20110214199- | — | M-328 | D-329 | P-335 | E-368 | D-369 | L-381 | F-402 |
| 47919 | | | | | | | | |
| US20110214199- | P-325 | M-333 | G-334 | D-340 | P-373 | E-374 | L-386 | M-407 |
| 60662 | | | | | | | | |
| US20110214199- | T-332 | M-339 | G-340 | T-346 | A-379 | D-380 | L-392 | F-413 |
| 36660 | | | | | | | | |
| US20110214199- | T-346 | M-353 | G-354 | T-360 | P-393 | E-394 | L-406 | Y-427 |
| 17908 | | | | | | | | |
| US20110214199- | — | M-310 | G-311 | E-317 | G-349 | E-350 | L-362 | F-383 |
| 25308 | | | | | | | | |
| US20110214199- | — | M-310 | G-311 | E-317 | G-349 | E-350 | L-362 | F-383 |
| 64004 | | | | | | | | |
| US20110214199- | P-352 | M-359 | G-360 | T-366 | V-398 | D-399 | L-411 | F-432 |
| 25023 | | | | | | | | |
| US20110214199- | — | M-310 | G-311 | E-317 | G-349 | E-350 | L-362 | F-383 |
| 52644 | | | | | | | | |
| US20110214199- | P-343 | M-350 | G-351 | T-357 | A-390 | D-391 | L-403 | Y-424 |
| 13862 | | | | | | | | |
| US20110214199- | G-319 | M-326 | G-327 | E-333 | E-366 | D-367 | I-379 | F-400 |
| 29446 | | | | | | | | |
| US20110214199- | — | M-310 | G-311 | E-317 | G-349 | E-350 | L-362 | F-383 |
| 5988 | | | | | | | | |
| US20110214199- | — | M-310 | G-311 | E-317 | G-349 | E-350 | L-362 | F-383 |
| 23246 | | | | | | | | |
| US20110214199- | A-315 | M-323 | G-324 | Q-330 | R-363 | D-364 | L-376 | Y-397 |
| 12000 | | | | | | | | |
| US20110214199- | Q-313 | M-321 | G-322 | Q-328 | E-359 | N-360 | L-372 | F-393 |
| 56949 | | | | | | | | |
| US8101393-0272 | P-334 | M-342 | D-343 | D-349 | P-382 | S-383 | L-395 | F-416 |
| US8101393-0014 | — | M-333 | G-334 | D-340 | A-373 | E-374 | L-386 | F-407 |
| US8101393-0398 | R-346 | M-353 | G-354 | P-360 | V-392 | D-393 | F-405 | F-426 |
| US8101393-0492 | R-346 | M-353 | G-354 | P-360 | V-392 | D-393 | F-405 | F-426 |
| US8101393-0400 | R-346 | M-353 | D-354 | P-360 | V-392 | D-393 | F-405 | F-426 |
| US8101393-0266 | A-345 | M-352 | G-353 | S-359 | P-392 | D-393 | V-405 | F-426 |
| US8101393-0366 | — | M-308 | G-309 | E-315 | G-347 | E-348 | L-360 | F-381 |
| US8101393-0342 | — | M-332 | G-333 | E-339 | P-372 | N-373 | L-385 | F-406 |
| US8101393-0356 | — | R-322 | D-323 | Q-329 | P-362 | D-363 | L-375 | F-396 |
| US8101393-0320 | L-318 | M-326 | G-327 | E-333 | S-366 | N-367 | L-379 | Y-400 |
| US7314974-19451 | — | M-326 | D-327 | P-333 | E-366 | D-367 | L-379 | F-400 |
| US7314974-8251 | P-327 | M-334 | G-335 | T-341 | V-373 | D-374 | L-386 | F-407 |
| US7630836-9340 | — | M-324 | D-325 | T-331 | P-364 | D-365 | L-377 | F-398 |
| US7630836-12787 | T-346 | M-353 | G-354 | T-360 | P-393 | E-394 | L-406 | Y-427 |
| US20090220480- | — | M-328 | G-329 | S-335 | A-368 | N-369 | L-381 | F-402 |
| 0018 | | | | | | | | |
| US20120034253- | — | M-310 | G-311 | E-317 | G-349 | E-350 | L-362 | F-383 |
| 0080 | | | | | | | | |
| US20120034253- | — | M-310 | G-311 | E-317 | G-349 | E-350 | L-362 | F-383 |
| 0077 | | | | | | | | |
| US20120034253- | — | M-310 | G-311 | E-317 | G-349 | E-350 | L-362 | F-383 |
| 0078 | | | | | | | | |
| WO2012016960- | P-351 | M-359 | N-360 | A-366 | A-399 | D-400 | V-412 | F-433 |
| 11369 | | | | | | | | |
| US20120015408- | G-319 | M-326 | G-327 | E-333 | E-366 | D-367 | I-379 | F-400 |
| 0002 | | | | | | | | |
| US20120015408- | G-319 | M-326 | G-327 | E-333 | E-366 | D-367 | I-379 | F-400 |
| 0004 | | | | | | | | |
| US20120015408- | G-319 | M-326 | G-327 | E-333 | E-366 | D-367 | I-379 | F-400 |
| 0006 | | | | | | | | |
| US20120015408- | G-319 | M-326 | G-327 | E-333 | E-366 | D-367 | I-379 | F-400 |
| 0008 | | | | | | | | |
| US20120015408- | G-319 | M-326 | G-327 | E-333 | E-366 | D-367 | I-379 | F-400 |
| 0010 | | | | | | | | |
| US20120015408- | G-319 | M-326 | G-327 | E-333 | E-366 | D-367 | I-379 | F-400 |
| 0012 | | | | | | | | |
| US20120015408- | G-319 | M-326 | G-327 | E-333 | E-366 | D-367 | I-379 | F-400 |
| 0014 | | | | | | | | |
| US20120015408- | G-319 | M-326 | G-327 | E-333 | E-366 | D-367 | I-379 | F-400 |
| 0016 | | | | | | | | |
| US20120015408- | G-319 | M-326 | G-327 | E-333 | E-366 | D-367 | I-379 | F-400 |
| 0018 | | | | | | | | |
| US20120015408- | G-319 | M-326 | G-327 | E-333 | E-366 | D-367 | I-379 | F-400 |
| 0020 | | | | | | | | |
| US20120015408- | G-319 | M-326 | G-327 | E-333 | E-366 | D-367 | I-379 | F-400 |
| 0022 | | | | | | | | |
| US20120015408- | G-319 | M-326 | G-327 | E-333 | E-366 | D-367 | I-379 | F-400 |
| 0026 | | | | | | | | |
| US20120015408- | G-319 | M-326 | G-327 | E-333 | E-366 | D-367 | I-379 | F-400 |
| 0028 | | | | | | | | |
| US20120015408- | G-319 | M-326 | G-327 | E-333 | E-366 | D-367 | I-379 | F-400 |
| 0030 | | | | | | | | |
| US20120015408- | G-319 | M-326 | G-327 | E-333 | E-366 | D-367 | I-379 | F-400 |
| 0032 | | | | | | | | |
| US20120015408- | G-319 | M-326 | G-327 | E-333 | E-366 | D-367 | I-379 | F-400 |
| 0034 | | | | | | | | |
| US20120015408- | G-319 | M-326 | G-327 | E-333 | E-366 | D-367 | I-379 | F-400 |
| 0036 | | | | | | | | |
| US20120015408- | G-319 | M-326 | G-327 | E-333 | E-366 | D-367 | I-379 | F-400 |
| 0038 | | | | | | | | |
| US20120015408- | G-319 | M-326 | G-327 | E-333 | E-366 | D-367 | I-379 | F-400 |
| 0040 | | | | | | | | |
| US20120015408- | G-319 | M-326 | G-327 | E-333 | E-366 | D-367 | I-379 | F-400 |
| 0042 | | | | | | | | |
| US20120015408- | G-319 | M-326 | G-327 | E-333 | E-366 | D-367 | I-379 | F-400 |
| 0044 | | | | | | | | |
| US20120015408- | G-319 | M-326 | G-327 | E-333 | E-366 | D-367 | I-379 | F-400 |
| 0046 | | | | | | | | |
| US20120015408- | G-319 | M-326 | G-327 | E-333 | E-366 | D-367 | I-379 | F-400 |
| 0048 | | | | | | | | |
| US20120015408- | G-319 | M-326 | G-327 | E-333 | E-366 | D-367 | I-379 | F-400 |
| 0050 | | | | | | | | |
| US20120015408- | G-319 | M-326 | G-327 | E-333 | E-366 | D-367 | I-379 | F-400 |
| 0052 | | | | | | | | |
| US20120015408- | G-319 | M-326 | G-327 | E-333 | E-366 | D-367 | I-379 | F-400 |
| 0054 | | | | | | | | |
| US20120015408- | G-319 | M-326 | G-327 | E-333 | E-366 | D-367 | I-379 | F-400 |
| 0056 | | | | | | | | |
| US20120015408- | G-319 | M-326 | G-327 | E-333 | E-366 | D-367 | I-379 | F-400 |
| 0058 | | | | | | | | |
| US20120015408- | G-319 | M-326 | G-327 | E-333 | E-366 | D-367 | I-379 | F-400 |
| 0060 | | | | | | | | |
| US20120015408- | G-319 | M-326 | G-327 | E-333 | E-366 | D-367 | I-379 | F-400 |
| 0062 | | | | | | | | |
| US20120015408- | G-319 | M-326 | G-327 | E-333 | E-366 | D-367 | I-379 | F-400 |
| 0064 | | | | | | | | |
| US20120015408- | G-319 | M-326 | G-327 | E-333 | E-366 | D-367 | I-379 | F-400 |
| 0066 | | | | | | | | |
| US20120015408- | G-319 | M-326 | G-327 | E-333 | E-366 | D-367 | I-379 | F-400 |
| 0068 | | | | | | | | |
| US20120015408- | G-319 | M-326 | G-327 | E-333 | E-366 | D-367 | I-379 | F-400 |
| 0070 | | | | | | | | |
| US20120015408- | G-319 | M-326 | G-327 | E-333 | E-366 | D-367 | I-379 | F-400 |
| 0072 | | | | | | | | |
| US20120015408- | G-319 | M-326 | G-327 | E-333 | E-366 | D-367 | I-379 | F-400 |
| 0074 | | | | | | | | |
| US20120015408- | G-319 | M-326 | G-327 | E-333 | E-366 | D-367 | I-379 | F-400 |
| 0076 | | | | | | | | |
| US20120015408- | G-319 | M-326 | G-327 | E-333 | E-366 | D-367 | I-379 | F-400 |
| 0078 | | | | | | | | |
| US20120015408- | G-319 | M-326 | G-327 | E-333 | E-366 | D-367 | I-379 | F-400 |
| 0080 | | | | | | | | |
| US20120015408- | G-319 | M-326 | G-327 | E-333 | E-366 | D-367 | I-379 | F-400 |
| 0082 | | | | | | | | |
| US20120015408- | G-319 | M-326 | G-327 | E-333 | E-366 | D-367 | I-379 | F-400 |
| 0086 | | | | | | | | |
| US20120015408- | G-319 | M-326 | G-327 | E-333 | E-366 | D-367 | I-379 | F-400 |
| 0084 | | | | | | | | |
| US20120015408- | G-319 | M-326 | G-327 | E-333 | E-366 | D-367 | I-379 | F-400 |
| 0088 | | | | | | | | |
| US20120015408- | G-319 | M-326 | G-327 | E-333 | E-366 | D-367 | I-379 | F-400 |
| 0090 | | | | | | | | |
| US20120015408- | G-319 | M-326 | G-327 | E-333 | E-366 | D-367 | I-379 | F-400 |
| 0092 | | | | | | | | |
| US20120015408- | G-319 | M-326 | G-327 | E-333 | E-366 | D-367 | I-379 | F-400 |
| 0094 | | | | | | | | |
| US20120015408- | G-319 | M-326 | G-327 | E-333 | E-366 | D-367 | I-379 | F-400 |
| 0096 | | | | | | | | |
| US20120015408- | G-319 | M-326 | G-327 | E-333 | E-366 | D-367 | I-379 | F-400 |
| 0098 | | | | | | | | |
| US20120015408- | G-319 | M-326 | G-327 | E-333 | E-366 | D-367 | I-379 | F-400 |
| 0100 | | | | | | | | |
| US20120015408- | G-319 | M-326 | G-327 | E-333 | E-366 | D-367 | I-379 | F-400 |
| 0102 | | | | | | | | |
| US20120015408- | G-319 | M-326 | G-327 | E-333 | E-366 | D-367 | I-379 | F-400 |
| 0104 | | | | | | | | |
| US20120015408- | G-319 | M-326 | G-327 | E-333 | E-366 | D-367 | I-379 | F-400 |
| 0106 | | | | | | | | |
| US20120015408- | G-319 | M-326 | G-327 | E-333 | E-366 | D-367 | I-379 | F-400 |
| 0108 | | | | | | | | |
| US20120015408- | G-319 | M-326 | G-327 | E-333 | E-366 | D-367 | I-379 | F-400 |
| 0110 | | | | | | | | |
| US20120015408- | G-319 | M-326 | G-327 | E-333 | E-366 | D-367 | I-379 | F-400 |
| 0112 | | | | | | | | |
| US20120015408- | G-319 | M-326 | G-327 | E-333 | E-366 | D-367 | I-379 | F-400 |
| 0114 | | | | | | | | |
| US20120015408- | G-319 | M-326 | G-327 | E-333 | E-366 | D-367 | I-379 | F-400 |
| 0116 | | | | | | | | |
| US20120015408- | G-319 | M-326 | G-327 | E-333 | E-366 | D-367 | I-379 | F-400 |
| 0118 | | | | | | | | |
| US20120015408- | G-319 | M-326 | G-327 | E-333 | E-366 | D-367 | I-379 | F-400 |
| 0120 | | | | | | | | |
| US20120015408- | G-319 | M-326 | G-327 | E-333 | E-366 | D-367 | I-379 | F-400 |
| 0122 | | | | | | | | |
| US20120015408- | G-319 | M-326 | G-327 | E-333 | E-366 | D-367 | I-379 | F-400 |
| 0124 | | | | | | | | |
| US8202716-0464 | G-318 | M-325 | D-326 | D-332 | — | D-365 | L-377 | Y-398 |
| US20110262988- | L-318 | M-326 | G-327 | E-333 | S-366 | N-367 | L-379 | Y-400 |
| 0002 | | | | | | | | |
| US20110262988- | L-341 | M-349 | G-350 | E-356 | S-389 | N-390 | L-402 | Y-423 |
| 0003 | | | | | | | | |
| US20110151538- | L-370 | M-378 | G-379 | E-385 | S-418 | N-419 | L-431 | Y-452 |
| 0130 | | | | | | | | |
| US20100003234- | P-318 | M-326 | G-327 | Q-333 | S-366 | N-367 | L-379 | F-400 |
| 0048 | | | | | | | | |
| US6184018-0012 | L-318 | M-326 | G-327 | E-333 | S-366 | N-367 | L-379 | Y-400 |
| US6377893-0063 | L-313 | M-321 | G-322 | E-328 | S-361 | N-362 | L-374 | Y-395 |
| ACJ34717 | S-328 | M-336 | N-337 | N-343 | E-376 | D-377 | I-389 | Y-410 |
| ADD27066 | — | M-320 | D-321 | E-327 | D-360 | D-361 | F-373 | F-394 |
| ACZ42845 | — | M-329 | G-330 | Q-336 | V-369 | E-370 | Y-382 | F-403 |
| ABQ91969 | — | M-323 | D-324 | D-330 | P-363 | D-364 | I-376 | F-397 |
| ABU56651 | — | M-323 | D-324 | A-330 | S-363 | D-364 | I-376 | F-397 |
| AEY92801 | — | M-326 | D-327 | S-333 | P-366 | D-367 | L-379 | F-400 |
| CAD55382 | — | M-340 | D-341 | G-347 | P-380 | D-381 | L-393 | F-414 |
| AD073143 | — | M-332 | G-333 | D-339 | E-372 | D-373 | L-385 | F-406 |
| CCA60311 | P-334 | M-342 | D-343 | D-349 | P-382 | S-383 | L-395 | F-416 |
| ADI15206 | — | M-331 | G-332 | Q-338 | E-370 | G-371 | Y-383 | Y-404 |
| ADI12494 | — | M-326 | D-327 | T-333 | P-366 | D-367 | L-379 | F-400 |
| ACU35736 | R-333 | M-341 | E-342 | R-348 | D-381 | D-382 | I-394 | F-415 |
| BAC69512 | — | M-324 | D-325 | T-331 | P-364 | D-365 | L-377 | F-398 |
| AEN08263 | — | M-326 | D-327 | G-333 | P-366 | D-367 | L-379 | Y-400 |
| CCA53915 | — | M-350 | D-351 | G-357 | P-390 | D-391 | L-403 | Y-424 |
| CAJ88063 | — | M-326 | D-327 | G-333 | P-366 | D-367 | L-379 | Y-400 |
| ABF87202 | — | M-328 | D-329 | P-335 | E-368 | D-369 | L-381 | F-402 |
| BAJ30040 | — | M-323 | D-324 | P-330 | A-363 | D-364 | L-376 | F-397 |
| ACO44852 | — | M-317 | H-318 | Q-324 | H-357 | A-358 | Y-370 | F-391 |
| AFO59750 | R-327 | M-334 | G-335 | D-341 | R-374 | E-375 | L-387 | F-408 |
| BAJ31549 | P-360 | M-368 | G-369 | D-375 | P-408 | S-409 | L-421 | F-442 |
| ACY97307 | R-349 | M-356 | G-357 | E-363 | P-396 | D-397 | L-409 | F-430 |
| ACM06095 | D-320 | M-328 | G-329 | E-335 | A-368 | — | L-380 | F-401 |
| AEI64652 | — | M-328 | G-329 | P-335 | E-368 | D-369 | L-381 | F-402 |
| BAG17581 | — | M-340 | D-341 | A-347 | A-380 | D-381 | L-393 | F-414 |
| AEM83530 | — | M-326 | D-327 | T-333 | P-366 | D-367 | L-379 | F-400 |
| ADG89307 | — | L-341 | G-342 | E-348 | — | D-377 | L-389 | F-410 |
| ABG04991 | P-325 | M-333 | G-334 | D-340 | P-373 | E-374 | L-386 | M-407 |
| ABP54026 | R-347 | M-354 | D-355 | S-361 | V-393 | D-394 | F-406 | F-427 |
| ABV97405 | R-347 | M-354 | D-355 | P-361 | V-393 | E-394 | F-406 | F-427 |
| ADH60167 | G-316 | M-323 | G-324 | E-330 | E-363 | D-364 | I-376 | F-397 |
| ADV80493 | G-316 | M-323 | G-324 | E-330 | E-363 | D-364 | I-376 | F-397 |
| AEM77729 | G-316 | M-323 | G-324 | E-330 | E-363 | D-364 | I-376 | F-397 |
| ABK71329 | T-332 | M-339 | G-340 | T-346 | A-379 | D-380 | L-392 | F-413 |
| ACZ89864 | A-342 | M-350 | G-351 | N-357 | E-389 | D-390 | L-402 | L-423 |
| BAC72965 | T-346 | M-353 | G-354 | T-360 | P-393 | E-394 | L-406 | Y-427 |
| ADD25173 | G-317 | M-324 | G-325 | E-331 | E-364 | D-365 | I-377 | F-398 |
| ABF44291 | — | M-325 | G-326 | Q-332 | E-365 | D-366 | L-378 | F-399 |
| AEY93261 | — | M-341 | G-342 | G-348 | A-383 | D-384 | L-396 | Y-417 |
| 1NP2 | — | M-310 | G-311 | E-317 | G-349 | E-350 | L-362 | F-383 |
| AEG34643 | — | M-310 | G-311 | E-317 | G-349 | E-350 | L-362 | F-383 |
| AFR07907 | Q-333 | M-340 | G-341 | R-347 | S-379 | E-380 | Y-393 | F-414 |
| AEB43702 | R-346 | M-353 | D-354 | P-360 | I-392 | D-393 | F-405 | F-426 |
| BAL92882 | P-336 | M-344 | N-345 | A-351 | E-384 | N-385 | I-397 | F-418 |
| CCA59876 | A-345 | M-352 | G-353 | S-359 | P-392 | D-393 | V-405 | F-426 |
| ACU74192 | R-338 | M-346 | D-347 | S-353 | P-386 | D-387 | L-399 | F-420 |
| ABV96319 | P-325 | M-333 | G-334 | A-340 | G-385 | A-386 | L-398 | L-419 |
| AF053528 | P-346 | M-353 | G-354 | T-360 | P-393 | E-394 | V-406 | F-427 |
| AFH40090 | — | M-310 | G-311 | E-317 | G-349 | E-350 | L-362 | F-383 |
| ADL49193 | P-324 | M-332 | G-333 | A-339 | E-373 | Q-374 | L-386 | L-407 |
| AFE08200 | — | M-328 | D-329 | A-335 | A-368 | D-369 | L-381 | F-402 |
| AAN05441 | — | M-310 | G-311 | E-317 | G-349 | E-350 | L-362 | F-383 |
| CAJ90043 | — | M-335 | G-336 | D-342 | A-377 | D-378 | L-390 | Y-411 |
| AEY89575 | T-339 | M-346 | G-347 | T-353 | P-386 | D-387 | L-399 | Y-420 |
| AAF37730 | P-352 | M-359 | G-360 | T-366 | V-398 | D-399 | L-411 | F-432 |
| BAL98072 | — | M-330 | G-331 | Q-337 | A-370 | D-371 | L-383 | F-404 |
| AAN05440 | — | M-310 | G-311 | E-317 | G-349 | E-350 | L-362 | F-383 |
| AEM77895 | G-316 | M-323 | G-324 | E-330 | E-363 | D-364 | I-376 | F-397 |
| ADB34272 | G-341 | M-348 | G-349 | D-355 | A-388 | D-389 | L-401 | F-422 |
| ABW87307 | — | M-310 | G-311 | E-317 | G-349 | E-350 | L-362 | F-383 |
| AF322365 1 | — | M-310 | G-311 | E-317 | G-349 | E-350 | L-362 | F-383 |
| CAC10107 | P-343 | M-350 | G-351 | T-357 | A-390 | D-391 | L-403 | Y-424 |
| AEB47478 | P-325 | M-333 | G-334 | A-340 | G-375 | T-376 | L-388 | L-409 |
| ADL45220 | R-346 | M-353 | D-354 | P-360 | V-392 | D-393 | F-405 | F-426 |
| ABK51908 | W-347 | M-354 | G-355 | S-361 | D-393 | N-394 | I-406 | Y-427 |
| CAN94460 | — | M-333 | Q-334 | E-340 | K-373 | D-374 | L-386 | F-407 |
| AEF18219 | G-315 | M-322 | G-323 | E-329 | K-362 | D-363 | V-374 | F-395 |
| ADD39191 | P-357 | M-364 | G-365 | E-371 | A-404 | A-405 | V-417 | F-438 |
| ABP52811 | S-325 | M-333 | G-334 | A-340 | G-384 | V-385 | L-397 | L-418 |
| AEV88819 | P-351 | M-359 | N-360 | A-366 | A-399 | D-400 | V-412 | F-433 |
| AEY89570 | A-349 | M-356 | N-357 | S-363 | P-396 | E-397 | L-409 | F-430 |
| ADD01635 | G-316 | M-323 | G-324 | E-330 | E-363 | D-364 | I-376 | F-397 |
| CAB95278 | — | M-335 | N-336 | D-342 | A-377 | D-378 | L-390 | Y-411 |
| AEN13042 | — | M-335 | G-336 | H-342 | A-377 | D-378 | L-390 | Y-411 |
| ACY97750 | M-335 | M-342 | G-343 | A-349 | A-382 | D-383 | L-395 | F-416 |
| ADI10010 | T-335 | M-342 | G-343 | T-349 | A-382 | D-383 | L-395 | F-416 |
| CCB72805 | P-343 | M-350 | G-351 | S-357 | A-390 | S-391 | I-403 | F-424 |
| ACY14034 | L-337 | M-344 | G-345 | D-351 | A-384 | D-385 | V-397 | L-418 |
| AAZ55664 | — | M-336 | D-337 | E-343 | P-377 | D-378 | L-390 | F-411 |
| ADW02698 | — | M-335 | G-336 | E-342 | A-377 | D-378 | L-390 | Y-411 |
| ABC33525 | — | M-317 | G-318 | Q-324 | — | K-357 | L-369 | F-390 |
| ADB34282 | — | I-324 | D-325 | A-331 | A-364 | E-365 | L-377 | F-398 |
| AAM23648 | G-319 | M-326 | G-327 | E-333 | E-366 | D-367 | I-379 | F-400 |
| CCH86028 | P-334 | M-341 | G-342 | E-348 | A-381 | D-382 | L-394 | F-415 |
| ADV67544 | — | M-322 | N-323 | Q-329 | E-365 | H-366 | F-378 | F-399 |
| ACZ89862 | R-330 | M-338 | G-339 | F-345 | E-377 | D-378 | L-390 | L-411 |
| ADH66252 | Q-333 | M-340 | G-341 | T-347 | T-379 | E-380 | Y-393 | F-414 |
| ADV80605 | G-316 | M-323 | G-324 | E-330 | E-363 | D-364 | I-376 | F-397 |
| ADW05507 | P-349 | M-357 | D-358 | E-364 | P-397 | E-398 | L-410 | F-431 |
| BAA86923 | — | M-310 | G-311 | E-317 | G-349 | E-350 | L-362 | F-383 |
| AAN05438 | — | M-310 | G-311 | E-317 | G-349 | E-350 | L-362 | F-383 |
| CAC16438 | P-347 | M-354 | G-355 | T-361 | P-394 | E-395 | V-407 | F-428 |
| CAJ89567 | P-347 | M-354 | G-355 | T-361 | P-394 | A-395 | V-407 | F-428 |
| AFD27167 | — | M-333 | G-334 | Q-340 | E-373 | N-374 | L-386 | F-407 |
| BAG20044 | P-343 | M-351 | D-352 | D-358 | P-391 | E-392 | L-404 | F-425 |
| ACU71435 | F-327 | I-335 | D-336 | E-342 | A-375 | D-376 | I-388 | F-409 |
| ADG87563 | R-355 | M-363 | G-364 | D-370 | D-402 | G-403 | L-415 | F-436 |
| ABI35984 | — | M-310 | G-311 | E-317 | G-349 | E-350 | L-362 | F-383 |
| CAB42553 | — | M-310 | G-311 | E-317 | G-349 | E-350 | L-362 | F-383 |
| 1UG6 | — | M-310 | G-311 | E-317 | G-349 | E-350 | L-362 | F-383 |
| CAA91220 | G-319 | M-326 | G-327 | E-333 | E-366 | D-367 | I-379 | F-400 |
| AFK85369 | G-315 | M-322 | G-323 | E-329 | E-362 | D-363 | I-375 | F-396 |
| AEN10177 | A-350 | M-358 | D-359 | D-365 | P-398 | E-399 | L-411 | F-432 |
| AEM87460 | T-336 | M-343 | G-344 | T-350 | A-383 | E-384 | L-396 | F-417 |
| AAZ81839 | G-318 | M-325 | D-326 | D-332 | — | D-365 | L-377 | Y-398 |
| ADU50085 | P-357 | M-365 | D-366 | E-372 | E-408 | Q-409 | V-421 | F-442 |
| AEK47062 | F-337 | M-344 | G-345 | G-351 | S-384 | S-385 | F-397 | F-418 |
| ABD68852 | — | F-335 | G-336 | E-342 | P-375 | E-376 | L-388 | F-409 |
| ACL38401 | R-343 | M-351 | G-352 | E-358 | A-394 | T-395 | F-407 | L-428 |
| ABS05424 | L-353 | M-360 | G-361 | R-367 | A-400 | G-401 | L-412 | Y-433 |
| AEK43773 | D-323 | S-331 | G-332 | A-338 | D-371 | G-372 | L-384 | F-405 |
| AEV87561 | P-311 | M-318 | G-319 | D-325 | P-357 | D-358 | L-370 | F-391 |
| ACZ86244 | G-340 | M-347 | G-348 | S-354 | A-387 | D-388 | I-400 | F-421 |
| AEB46173 | Q-335 | M-342 | G-343 | V-349 | P-382 | D-383 | L-395 | F-416 |
| BAG21567 | A-351 | M-359 | N-360 | E-366 | A-399 | D-400 | L-412 | F-433 |
| ABX05041 | — | I-323 | G-324 | Q-330 | A-363 | H-364 | L-376 | F-397 |
| AFR09943 | — | M-353 | G-354 | S-360 | P-394 | D-395 | L-407 | F-428 |
| ACZ89285 | — | L-342 | G-343 | R-349 | — | R-378 | L-390 | F-411 |
| ACV58907 | G-315 | M-322 | D-323 | D-329 | — | D-362 | L-374 | Y-395 |
| ADG89462 | — | F-310 | G-311 | D-317 | Y-346 | D-347 | L-358 | F-377 |
| ADU09756 | — | L-352 | G-353 | Q-359 | R-389 | D-390 | V-402 | F-425 |
| ACZ90607 | — | F-311 | G-312 | D-318 | P-353 | D-354 | L-366 | Y-387 |
| ADG73989 | Q-344 | M-351 | G-352 | Q-358 | D-391 | D-392 | L-404 | F-425 |
| AEG45154 | S-379 | M-387 | G-388 | E-394 | P-430 | D-431 | I-443 | F-464 |
| AEJ43907 | G-315 | M-322 | D-323 | D-329 | — | D-362 | L-374 | Y-395 |
| ACZ20790 | P-357 | M-365 | D-366 | E-372 | P-408 | D-409 | Y-421 | F-442 |
| CCB77455 | — | F-329 | D-330 | E-336 | — | P-366 | L-377 | F-398 |
| ADL46625 | R-339 | M-346 | D-347 | E-353 | A-386 | D-387 | L-399 | F-420 |
| ADU10772 | R-339 | M-346 | D-347 | E-353 | A-386 | D-387 | L-399 | F-420 |
| ADD45899 | A-335 | M-342 | G-343 | D-349 | D-382 | D-383 | L-396 | F-417 |
| CCA53920 | H-338 | L-346 | G-347 | H-353 | A-386 | D-387 | L-399 | F-420 |
| BAJ28512 | A-354 | M-361 | G-362 | T-368 | P-400 | D-401 | V-413 | Y-434 |
| ACL70277 | M-317 | M-325 | G-326 | Q-332 | E-365 | E-366 | L-378 | Y-399 |
| CBG72797 | T-343 | M-350 | G-351 | T-357 | A-390 | D-391 | L-403 | Y-424 |
| AEW05616 | E-319 | M-326 | G-327 | E-333 | V-367 | D-368 | L-380 | Y-401 |
| AEB46623 | — | F-316 | D-317 | D-323 | A-358 | D-359 | L-371 | F-392 |
| 1GNX | P-347 | M-354 | G-355 | S-361 | P-394 | E-395 | V-407 | F-428 |
| ACV76621 | Q-339 | M-346 | G-347 | S-353 | E-386 | D-387 | L-399 | F-420 |
| ACZ31628 | S-377 | M-385 | G-386 | E-392 | E-428 | S-429 | I-442 | F-463 |
| ADH67953 | — | M-333 | D-334 | A-340 | E-374 | T-375 | L-387 | F-408 |
| ADB34290 | L-338 | M-345 | D-346 | E-352 | E-385 | N-386 | F-398 | L-419 |
| ADU09106 | — | F-345 | D-346 | D-352 | A-387 | D-388 | L-400 | F-421 |
| CAA82733 | P-347 | M-354 | G-355 | S-361 | P-394 | E-395 | V-407 | F-428 |
| CBG67455 | P-364 | M-371 | G-372 | S-378 | P-411 | A-412 | V-424 | F-445 |
| CAN00920 | Q-353 | M-360 | G-361 | Q-367 | V-400 | E-401 | L-416 | Q-437 |
| ADX71280 | P-341 | M-349 | G-350 | E-356 | E-392 | A-393 | F-405 | L-426 |
| ACQ81085 | D-361 | M-369 | D-370 | D-376 | S-412 | D-413 | V-425 | F-446 |
| 3AHX | A-315 | M-323 | G-324 | Q-330 | R-363 | D-364 | L-376 | Y-397 |
| ACU35632 | Y-336 | M-343 | D-344 | E-350 | P-384 | D-385 | L-397 | F-418 |
| AEV86556 | — | L-335 | G-336 | Q-342 | R-372 | E-373 | V-385 | F-407 |
| AEG45006 | Q-347 | M-354 | G-355 | A-361 | V-394 | D-395 | L-411 | F-432 |
| BAG18801 | R-339 | M-346 | D-347 | T-353 | A-385 | D-386 | L-398 | F-419 |
| ADI03707 | — | M-344 | G-345 | A-351 | P-385 | D-386 | L-398 | Y-419 |
| CAQ00266 | Q-353 | M-360 | G-361 | Q-367 | V-400 | D-401 | L-417 | Q-438 |
| ADD43929 | — | F-321 | D-322 | D-328 | D-363 | D-364 | L-376 | L-397 |
| ADJ49823 | P-324 | F-332 | G-333 | S-339 | V-370 | D-371 | F-383 | F-404 |
| ABX05062 | P-320 | R-328 | G-329 | A-335 | A-369 | D-370 | L-382 | Y-403 |
| ADL48215 | — | F-321 | D-322 | D-328 | A-363 | D-364 | L-376 | F-397 |
| ACU70272 | — | F-327 | D-328 | D-334 | V-368 | D-369 | L-381 | L-402 |
| ADG88606 | G-342 | M-349 | G-350 | S-356 | E-389 | D-390 | L-402 | F-423 |
| AEW47954 | — | M-323 | D-324 | D-330 | P-364 | D-365 | L-377 | F-398 |
| ACD20223 | — | M-345 | G-346 | D-352 | I-385 | D-386 | L-398 | F-419 |
| AFC28171 | G-317 | M-324 | D-325 | D-331 | — | D-364 | Y-376 | Y-397 |
| ADW03239 | R-338 | M-345 | D-346 | T-352 | A-384 | D-385 | L-397 | F-418 |
| CBT74727 | A-339 | M-347 | G-348 | E-354 | E-388 | E-389 | I-401 | F-422 |
| CAM04686 | P-329 | F-337 | G-338 | S-344 | S-377 | D-378 | F-390 | L-411 |
| ACZ20966 | Q-342 | M-349 | G-350 | A-356 | D-389 | D-390 | L-402 | F-423 |
| AEV38153 | L-331 | M-339 | G-340 | Q-346 | A-379 | D-380 | V-392 | F-413 |
| BAJ26623 | — | F-323 | G-324 | E-330 | — | D-360 | L-372 | Y-393 |
| BAL91665 | P-311 | L-318 | G-319 | D-325 | A-357 | G-358 | L-370 | F-391 |
| ACV09397 | M-340 | M-347 | G-348 | A-354 | P-387 | D-388 | L-400 | F-421 |
| ADG20157 | — | M-319 | D-320 | Q-326 | A-358 | N-359 | Y-371 | F-392 |
| ADC61565 | P-313 | M-321 | D-322 | E-328 | R-361 | D-362 | L-374 | C-395 |
| ACM66669 | A-339 | M-347 | G-348 | E-354 | E-388 | A-389 | I-401 | F-422 |
| ABD68843 | — | M-324 | G-325 | Q-331 | V-363 | D-364 | I-376 | F-397 |
| ABS61373 | S-313 | M-321 | G-322 | Q-328 | E-359 | N-360 | L-372 | F-393 |
| CBA30283 | — | M-329 | G-330 | Q-336 | V-368 | D-369 | M-381 | F-402 |
| AAA22266 | S-318 | I-326 | G-327 | E-333 | L-366 | D-367 | L-379 | M-400 |
| CAA42814 | L-318 | M-326 | G-327 | E-333 | S-366 | N-367 | L-379 | Y-400 |
| ABN51453 | L-341 | M-349 | G-350 | E-356 | S-389 | N-390 | L-402 | Y-423 |
| ACZ00292 | — | M-321 | G-322 | D-328 | G-362 | P-363 | L-376 | F-397 |
| AEI12946 | L-344 | M-351 | G-352 | E-358 | E-391 | D-392 | L-404 | F-425 |
| ABS15474 | Q-330 | V-338 | G-339 | R-345 | P-379 | D-380 | Y-392 | F-413 |
| ADL51094 | A-315 | M-323 | G-324 | Q-330 | R-363 | D-364 | L-376 | Y-397 |
| AFG34202 | Q-313 | M-321 | G-322 | Q-328 | E-359 | N-360 | L-372 | F-393 |
| AAN60220 | Q-313 | M-321 | G-322 | Q-328 | E-359 | N-360 | L-372 | F-393 |

TABLE 9C

| Corresp. | Sequence name | | | | | | | |
|---|---|---|---|---|---|---|---|---|
| Sequence Pos. | V400 | W401 | S402 | R410 | D414 | K415 | R416 | V420 |
| SEQ ID NO. 379/380 | V-400 | W-401 | S-402 | R-410 | D-414 | K-415 | R-416 | V-420 |
| SEQ ID NO. 378 | A-398 | W-399 | S-400 | A-408 | D-412 | K-413 | R-414 | F-418 |
| US8101393-0094 | V-400 | W-401 | S-402 | A-410 | D-414 | K-415 | R-416 | V-420 |
| US8101393-0388 | V-400 | W-401 | S-402 | A-410 | D-414 | K-415 | R-416 | V-420 |
| US8101393-0172 | A-397 | W-398 | S-399 | A-407 | D-411 | K-412 | R-413 | F-417 |
| JP2011205992-0018 | A-398 | W-399 | S-400 | A-408 | S-412 | M-413 | R-414 | C-418 |
| JP2011205992-0023 | A-395 | W-396 | S-397 | A-405 | A-409 | K-410 | R-411 | V-415 |
| JP2011205992-0022 | A-400 | W-401 | S-402 | S-410 | T-414 | K-415 | R-416 | H-420 |
| US20110214199-58656 | A-399 | W-400 | S-401 | A-409 | D-413 | K-414 | R-415 | V-419 |
| US20110214199-62406 | A-415 | W-416 | S-417 | A-425 | D-429 | K-430 | R-431 | V-435 |
| US20110214199-47919 | A-403 | W-404 | S-405 | A-413 | Q-417 | K-418 | R-419 | V-423 |
| US20110214199-60662 | V-408 | W-409 | S-410 | A-418 | S-422 | K-423 | R-424 | V-428 |
| US20110214199-36660 | V-414 | W-415 | S-416 | A-424 | A-428 | K-429 | R-430 | I-434 |
| US20110214199-17908 | L-428 | W-429 | S-430 | A-438 | G-442 | K-443 | R-444 | V-448 |
| US20110214199-25308 | V-384 | W-385 | S-386 | A-394 | T-398 | R-399 | R-400 | Y-404 |
| US20110214199-64004 | V-384 | W-385 | S-386 | A-394 | T-398 | R-399 | R-400 | Y-404 |
| US20110214199-25023 | A-433 | W-434 | S-435 | A-443 | G-447 | K-448 | R-449 | V-453 |
| US20110214199-52644 | V-384 | W-385 | S-386 | A-394 | T-398 | R-399 | R-400 | Y-404 |
| US20110214199-13862 | L-425 | W-426 | S-427 | A-435 | E-439 | K-440 | R-441 | V-445 |
| US20110214199-29446 | V-401 | W-402 | S-403 | A-411 | S-415 | K-416 | R-417 | V-421 |
| US20110214199-5988 | V-384 | W-385 | S-386 | A-394 | T-398 | R-399 | R-400 | Y-404 |
| US20110214199-23246 | V-384 | W-385 | S-386 | A-394 | T-398 | R-399 | R-400 | Y-404 |
| US20110214199-12000 | I-398 | W-399 | S-400 | A-408 | E-412 | K-413 | R-414 | V-418 |
| US20110214199-56949 | I-394 | W-395 | S-396 | A-404 | S-408 | K-409 | R-410 | I-414 |
| US8101393-0272 | L-417 | W-418 | S-419 | A-427 | S-431 | K-432 | R-433 | V-437 |
| US8101393-0014 | Q-408 | W-409 | S-410 | A-418 | T-422 | Q-423 | R-424 | V-428 |
| US8101393-0398 | A-427 | W-428 | S-429 | A-437 | T-441 | K-442 | R-443 | V-447 |
| US8101393-0492 | A-427 | W-428 | S-429 | A-437 | T-441 | K-442 | R-443 | V-447 |
| US8101393-0400 | A-427 | W-428 | S-429 | A-437 | T-441 | K-442 | R-443 | V-447 |
| US8101393-0266 | L-427 | W-428 | S-429 | A-437 | A-441 | K-442 | R-443 | V-447 |
| US8101393-0366 | A-382 | W-383 | S-384 | A-392 | T-396 | K-397 | R-398 | L-402 |
| US8101393-0342 | V-407 | W-408 | S-409 | A-417 | T-421 | Q-422 | R-423 | V-427 |
| US8101393-0356 | C-397 | W-398 | S-399 | A-407 | S-411 | S-412 | R-413 | A-417 |
| US8101393-0320 | L-401 | W-402 | S-403 | A-411 | N-415 | K-416 | R-417 | V-421 |
| US7314974-19451 | A-401 | W-402 | S-403 | A-411 | Q-415 | K-416 | R-417 | V-421 |
| US7314974-8251 | A-408 | W-409 | S-410 | A-418 | G-422 | K-423 | R-424 | V-428 |
| US7630836-9340 | A-399 | W-400 | S-401 | A-409 | D-413 | K-414 | R-415 | V-419 |
| US7630836-12787 | L-428 | W-429 | S-430 | A-438 | G-442 | K-443 | R-444 | V-448 |
| US20090220480-0018 | L-403 | W-404 | S-405 | A-413 | S-417 | K-418 | R-419 | F-423 |
| US20120034253-0080 | V-384 | W-385 | S-386 | A-394 | T-398 | R-399 | R-400 | Y-404 |
| US20120034253-0077 | V-384 | W-385 | S-386 | A-394 | T-398 | R-399 | R-400 | Y-404 |
| US20120034253-0078 | V-384 | W-385 | S-386 | A-394 | T-398 | R-399 | R-400 | Y-404 |
| WO2012016960-11369 | L-434 | W-435 | S-436 | A-444 | A-448 | K-449 | R-450 | V-454 |
| US20120015408-0002 | V-401 | W-402 | S-403 | A-411 | S-415 | K-416 | R-417 | V-421 |
| US20120015408-0004 | V-401 | W-402 | S-403 | A-411 | S-415 | K-416 | R-417 | V-421 |
| US20120015408-0006 | V-401 | W-402 | S-403 | A-411 | S-415 | K-416 | R-417 | V-421 |
| US20120015408-0008 | V-401 | W-402 | S-403 | A-411 | S-415 | K-416 | R-417 | V-421 |
| US20120015408-0010 | V-401 | W-402 | S-403 | A-411 | S-415 | K-416 | R-417 | V-421 |
| US20120015408-0012 | V-401 | W-402 | S-403 | A-411 | S-415 | K-416 | R-417 | V-421 |
| US20120015408-0014 | V-401 | W-402 | S-403 | A-411 | S-415 | K-416 | R-417 | V-421 |
| US20120015408-0016 | V-401 | W-402 | S-403 | A-411 | S-415 | K-416 | R-417 | V-421 |
| US20120015408-0018 | V-401 | W-402 | S-403 | A-411 | S-415 | K-416 | R-417 | V-421 |
| US20120015408-0020 | V-401 | W-402 | S-403 | A-411 | S-415 | K-416 | R-417 | V-421 |
| US20120015408-0022 | V-401 | W-402 | S-403 | A-411 | S-415 | K-416 | R-417 | V-421 |
| US20120015408-0026 | V-401 | W-402 | S-403 | A-411 | S-415 | K-416 | R-417 | V-421 |
| US20120015408-0028 | V-401 | W-402 | S-403 | A-411 | S-415 | K-416 | R-417 | V-421 |
| US20120015408-0030 | V-401 | W-402 | S-403 | A-411 | S-415 | K-416 | R-417 | V-421 |
| US20120015408-0032 | V-401 | W-402 | S-403 | A-411 | S-415 | K-416 | R-417 | V-421 |
| US20120015408-0034 | V-401 | W-402 | S-403 | A-411 | S-415 | K-416 | R-417 | V-421 |
| US20120015408-0036 | V-401 | W-402 | S-403 | A-411 | S-415 | K-416 | R-417 | V-421 |
| US20120015408-0038 | V-401 | W-402 | S-403 | A-411 | S-415 | K-416 | R-417 | V-421 |
| US20120015408-0040 | V-401 | W-402 | S-403 | A-411 | S-415 | K-416 | R-417 | V-421 |
| US20120015408-0042 | V-401 | W-402 | S-403 | A-411 | S-415 | K-416 | R-417 | V-421 |
| US20120015408-0044 | V-401 | W-402 | S-403 | A-411 | S-415 | K-416 | R-417 | V-421 |
| US20120015408-0046 | V-401 | W-402 | S-403 | A-411 | S-415 | K-416 | R-417 | V-421 |
| US20120015408-0048 | V-401 | W-402 | S-403 | A-411 | S-415 | K-416 | R-417 | V-421 |
| US20120015408-0050 | V-401 | W-402 | S-403 | A-411 | S-415 | K-416 | R-417 | V-421 |
| US20120015408-0052 | V-401 | W-402 | S-403 | A-411 | S-415 | K-416 | R-417 | V-421 |
| US20120015408-0054 | V-401 | W-402 | S-403 | A-411 | S-415 | K-416 | R-417 | V-421 |
| US20120015408-0056 | V-401 | W-402 | S-403 | A-411 | S-415 | K-416 | R-417 | V-421 |
| US20120015408-0058 | V-401 | W-402 | S-403 | A-411 | S-415 | K-416 | R-417 | V-421 |
| US20120015408-0060 | V-401 | W-402 | S-403 | A-411 | S-415 | K-416 | R-417 | V-421 |
| US20120015408-0062 | V-401 | W-402 | S-403 | A-411 | S-415 | K-416 | R-417 | V-421 |
| US20120015408-0064 | V-401 | W-402 | S-403 | A-411 | S-415 | K-416 | R-417 | V-421 |
| US20120015408-0066 | V-401 | W-402 | S-403 | A-411 | S-415 | K-416 | R-417 | V-421 |
| US20120015408-0068 | V-401 | W-402 | S-403 | A-411 | S-415 | K-416 | R-417 | V-421 |
| US20120015408-0070 | V-401 | W-402 | S-403 | A-411 | S-415 | K-416 | R-417 | V-421 |
| US20120015408-0072 | V-401 | W-402 | S-403 | A-411 | S-415 | K-416 | R-417 | V-421 |
| US20120015408-0074 | V-401 | W-402 | S-403 | A-411 | S-415 | K-416 | R-417 | V-421 |
| US20120015408-0076 | V-401 | W-402 | S-403 | A-411 | S-415 | K-416 | R-417 | V-421 |
| US20120015408-0078 | V-401 | W-402 | S-403 | A-411 | S-415 | K-416 | R-417 | V-421 |
| US20120015408-0080 | V-401 | W-402 | S-403 | A-411 | S-415 | K-416 | R-417 | V-421 |
| US20120015408-0082 | V-401 | W-402 | S-403 | A-411 | S-415 | K-416 | R-417 | V-421 |
| US20120015408-0086 | V-401 | W-402 | S-403 | A-411 | S-415 | K-416 | R-417 | V-421 |
| US20120015408-0084 | V-401 | W-402 | S-403 | A-411 | S-415 | K-416 | R-417 | V-421 |
| US20120015408-0088 | V-401 | W-402 | S-403 | A-411 | S-415 | K-416 | R-417 | V-421 |
| US20120015408-0090 | V-401 | W-402 | S-403 | A-411 | S-415 | K-416 | R-417 | V-421 |
| US20120015408-0092 | V-401 | W-402 | S-403 | A-411 | S-415 | K-416 | R-417 | V-421 |
| US20120015408-0094 | V-401 | W-402 | S-403 | A-411 | S-415 | K-416 | R-417 | V-421 |
| US20120015408-0096 | V-401 | W-402 | S-403 | A-411 | S-415 | K-416 | R-417 | V-421 |
| US20120015408-0098 | V-401 | W-402 | S-403 | A-411 | S-415 | K-416 | R-417 | V-421 |
| US20120015408-0100 | V-401 | W-402 | S-403 | A-411 | S-415 | K-416 | R-417 | V-421 |
| US20120015408-0102 | V-401 | W-402 | S-403 | A-411 | S-415 | K-416 | R-417 | V-421 |
| US20120015408-0104 | V-401 | W-402 | S-403 | A-411 | S-415 | K-416 | R-417 | V-421 |
| US20120015408-0106 | V-401 | W-402 | S-403 | A-411 | S-415 | K-416 | R-417 | V-421 |
| US20120015408-0108 | V-401 | W-402 | S-403 | A-411 | S-415 | K-416 | R-417 | V-421 |
| US20120015408-0110 | V-401 | W-402 | S-403 | A-411 | S-415 | K-416 | R-417 | V-421 |
| US20120015408-0112 | V-401 | W-402 | S-403 | A-411 | S-415 | K-416 | R-417 | V-421 |
| US20120015408-0114 | V-401 | W-402 | S-403 | A-411 | S-415 | K-416 | R-417 | V-421 |
| US20120015408-0116 | V-401 | W-402 | S-403 | A-411 | S-415 | K-416 | R-417 | V-421 |
| US20120015408-0118 | V-401 | W-402 | S-403 | A-411 | S-415 | K-416 | R-417 | V-421 |
| US20120015408-0120 | V-401 | W-402 | S-403 | A-411 | S-415 | K-416 | R-417 | V-421 |
| US20120015408-0122 | V-401 | W-402 | S-403 | A-411 | S-415 | K-416 | R-417 | V-421 |
| US20120015408-0124 | V-401 | W-402 | S-403 | A-411 | S-415 | K-416 | R-417 | V-421 |
| US8202716-0464 | V-399 | W-400 | S-401 | A-409 | T-413 | K-414 | R-415 | V-419 |
| US20110262988-0002 | L-401 | W-402 | S-403 | A-411 | N-415 | K-416 | R-417 | V-421 |
| US20110262988-0003 | L-424 | W-425 | S-426 | A-434 | N-438 | K-439 | R-440 | V-444 |
| US20110151538-0130 | L-453 | W-454 | S-455 | A-463 | N-467 | K-468 | R-469 | V-473 |
| US20100003234-0048 | V-401 | W-402 | T-403 | A-411 | S-415 | K-416 | R-417 | I-421 |
| US6184018-0012 | L-401 | W-402 | S-403 | A-411 | N-415 | K-416 | R-417 | V-421 |
| US6377893-0063 | L-396 | W-397 | S-398 | A-406 | N-410 | K-411 | R-412 | V-416 |
| ACJ34717 | V-411 | W-412 | S-413 | A-421 | D-425 | K-426 | R-427 | V-431 |
| ADD27066 | A-395 | W-396 | S-397 | A-405 | A-409 | K-410 | R-411 | V-415 |
| ACZ42845 | A-404 | W-405 | S-406 | A-414 | S-418 | K-419 | R-420 | Y-424 |
| ABQ91969 | V-398 | W-399 | S-400 | A-408 | S-412 | R-413 | R-414 | I-418 |
| ABTJ56651 | V-398 | W-399 | S-400 | A-408 | S-412 | R-413 | R-414 | V-418 |
| AEY92801 | A-401 | W-402 | S-403 | A-411 | D-415 | K-416 | R-417 | V-421 |
| CAD55382 | A-415 | W-416 | S-417 | A-425 | D-429 | K-430 | R-431 | V-435 |
| AD073143 | V-407 | W-408 | S-409 | D-417 | S-421 | Q-422 | R-423 | V-427 |
| CCA60311 | L-417 | W-418 | S-419 | A-427 | S-431 | K-432 | R-433 | V-437 |
| ADI15206 | A-405 | W-406 | S-407 | A-415 | S-419 | K-420 | R-421 | F-425 |
| ADI12494 | A-401 | W-402 | S-403 | A-411 | G-415 | K-416 | R-417 | V-421 |
| ACU35736 | A-416 | W-417 | S-418 | A-426 | A-430 | K-431 | R-432 | V-436 |
| BAC69512 | A-399 | W-400 | S-401 | A-409 | D-413 | K-414 | R-415 | V-419 |
| AEN08263 | A-401 | W-402 | S-403 | A-411 | D-415 | K-416 | R-417 | V-421 |
| CCA53915 | A-425 | W-426 | S-427 | A-435 | D-439 | K-440 | R-441 | V-445 |
| CAJ88063 | A-401 | W-402 | S-403 | A-411 | D-415 | K-416 | R-417 | V-421 |
| ABF87202 | A-403 | W-404 | S-405 | A-413 | Q-417 | K-418 | R-419 | V-423 |
| BAJ30040 | A-398 | W-399 | S-400 | A-408 | D-412 | K-413 | R-414 | I-418 |
| ACO44852 | A-392 | W-393 | S-394 | A-402 | S-406 | R-407 | R-408 | F-412 |
| AFO59750 | V-409 | W-410 | T-411 | A-419 | S-423 | K-424 | R-425 | V-429 |
| BAJ31549 | L-443 | W-444 | S-445 | A-453 | S-457 | K-458 | R-459 | V-463 |
| ACY97307 | T-431 | W-432 | S-433 | A-441 | S-445 | R-446 | R-447 | V-451 |
| ACM06095 | V-402 | W-403 | S-404 | A-412 | S-416 | K-417 | R-418 | V-422 |
| AEI64652 | A-403 | W-404 | S-405 | A-413 | Q-417 | K-418 | R-419 | V-423 |
| BAG17581 | A-415 | W-416 | S-417 | A-425 | D-429 | K-430 | R-431 | V-435 |
| AEM83530 | A-401 | W-402 | S-403 | A-411 | D-415 | K-416 | R-417 | V-421 |
| ADG89307 | C-411 | W-412 | S-413 | A-421 | A-425 | A-426 | R-427 | V-431 |
| ABG04991 | V-408 | W-409 | S-410 | A-418 | S-422 | K-423 | R-424 | V-428 |
| ABP54026 | A-428 | W-429 | S-430 | A-438 | T-442 | K-443 | R-444 | I-448 |
| ABV97405 | A-428 | W-429 | S-430 | A-438 | T-442 | K-443 | R-444 | I-448 |
| ADH60167 | V-398 | W-399 | S-400 | A-408 | S-412 | K-413 | R-414 | V-418 |
| ADV80493 | V-398 | W-399 | S-400 | A-408 | S-412 | K-413 | R-414 | V-418 |
| AEM77729 | V-398 | W-399 | S-400 | V-408 | S-412 | K-413 | R-414 | V-418 |
| ABK71329 | V-414 | W-415 | S-416 | A-424 | A-428 | K-429 | R-430 | I-434 |
| ACZ89864 | V-424 | W-425 | S-426 | A-434 | R-438 | R-439 | R-440 | V-444 |
| BAC72965 | L-428 | W-429 | S-430 | A-438 | G-442 | K-443 | R-444 | V-448 |
| ADD25173 | V-399 | W-400 | S-401 | A-409 | S-413 | K-414 | R-415 | V-419 |
| ABF44291 | A-400 | W-401 | S-402 | A-410 | E-414 | K-415 | R-416 | V-420 |
| AEY93261 | V-418 | W-419 | S-420 | A-428 | D-432 | K-433 | R-434 | V-438 |
| 1NP2 | V-384 | W-385 | S-386 | A-394 | T-398 | R-399 | R-400 | Y-404 |
| AEG34643 | V-384 | W-385 | S-386 | A-394 | T-398 | R-399 | R-400 | Y-404 |
| AFR07907 | A-415 | W-416 | S-417 | A-425 | S-429 | R-430 | R-431 | V-435 |
| AEB43702 | A-427 | W-428 | S-429 | A-437 | T-441 | K-442 | R-443 | I-447 |
| BAL92882 | A-419 | W-420 | S-421 | A-429 | A-433 | K-434 | R-435 | V-439 |
| CCA59876 | L-427 | W-428 | S-429 | A-437 | A-441 | K-442 | R-443 | V-447 |
| ACU74192 | V-421 | W-422 | S-423 | S-431 | S-435 | K-436 | R-437 | V-441 |
| ABV96319 | V-420 | W-421 | S-422 | A-430 | R-434 | K-435 | R-436 | V-440 |
| AF053528 | L-428 | W-429 | S-430 | A-438 | S-442 | K-443 | R-444 | V-448 |
| AFH40090 | V-384 | W-385 | S-386 | A-394 | T-398 | R-399 | R-400 | Y-404 |
| ADL49193 | V-408 | W-409 | S-410 | A-418 | R-422 | K-423 | R-424 | V-428 |
| AFE08200 | A-403 | W-404 | S-405 | A-413 | T-417 | K-418 | R-419 | V-423 |
| AAN05441 | V-384 | W-385 | S-386 | A-394 | T-398 | R-399 | R-400 | Y-404 |
| CAJ90043 | V-412 | W-413 | S-414 | A-422 | D-426 | K-427 | R-428 | V-432 |
| AEY89575 | L-421 | W-422 | S-423 | A-431 | G-435 | K-436 | R-437 | V-441 |
| AAF37730 | A-433 | W-434 | S-435 | A-443 | G-447 | K-448 | R-449 | V-453 |
| BAL98072 | I-405 | W-406 | S-407 | A-415 | T-419 | Q-420 | R-421 | V-425 |
| AAN05440 | V-384 | W-385 | S-386 | A-394 | T-398 | R-399 | R-400 | Y-404 |
| AEM77895 | V-398 | W-399 | S-400 | A-408 | S-412 | K-413 | R-414 | V-418 |
| ADB34272 | C-423 | W-424 | S-425 | S-433 | A-437 | R-438 | R-439 | V-443 |
| ABW87307 | V-384 | W-385 | S-386 | A-394 | T-398 | R-399 | R-400 | Y-404 |
| AF322365_1 | V-384 | W-385 | S-386 | A-394 | T-398 | R-399 | R-400 | Y-404 |
| CAC10107 | L-425 | W-426 | S-427 | A-435 | E-439 | K-440 | R-441 | V-445 |
| AEB47478 | V-410 | W-411 | S-412 | A-420 | R-424 | K-425 | R-426 | V-430 |
| ADL45220 | A-427 | W-428 | S-429 | A-437 | T-441 | K-442 | R-443 | V-447 |
| ABK51908 | L-428 | W-429 | S-430 | A-438 | S-442 | R-443 | R-444 | V-448 |
| CAN94460 | V-408 | W-409 | S-410 | D-418 | S-422 | Q-423 | R-424 | V-428 |
| AEF18219 | L-396 | W-397 | S-398 | A-406 | S-410 | K-411 | R-412 | V-416 |
| ADD39191 | L-439 | W-440 | S-441 | A-449 | A-453 | K-454 | R-455 | V-459 |
| ABP52811 | V-419 | W-420 | S-421 | A-429 | R-433 | K-434 | R-435 | V-439 |
| AEV88819 | L-434 | W-435 | S-436 | A-444 | A-448 | K-449 | R-450 | V-454 |
| AEY89570 | L-431 | W-432 | S-433 | S-441 | S-445 | K-446 | R-447 | V-451 |
| ADD01635 | V-398 | W-399 | S-400 | A-408 | S-412 | K-413 | R-414 | V-418 |
| CAB95278 | V-412 | W-413 | S-414 | A-422 | D-426 | K-427 | R-428 | V-432 |
| AEN13042 | V-412 | W-413 | S-414 | A-422 | A-426 | K-427 | R-428 | I-432 |
| ACY97750 | V-417 | W-418 | S-419 | A-427 | S-431 | K-432 | R-433 | V-437 |
| ADI10010 | L-417 | W-418 | S-419 | A-427 | S-431 | K-432 | R-433 | V-437 |
| CCB72805 | V-425 | W-426 | S-427 | S-435 | G-439 | K-440 | R-441 | V-445 |
| ACY14034 | L-419 | W-420 | S-421 | A-429 | A-433 | K-434 | R-435 | V-439 |
| AAZ55664 | V-412 | W-413 | S-414 | A-422 | E-426 | R-427 | R-428 | V-432 |
| ADW02698 | V-412 | W-413 | S-414 | A-422 | A-426 | K-427 | R-428 | I-432 |
| ABC33525 | Y-391 | W-392 | S-393 | N-401 | S-405 | K-406 | R-407 | T-411 |
| ADB34282 | A-399 | W-400 | S-401 | A-409 | A-413 | P-414 | R-415 | A-419 |
| AAM23648 | V-401 | W-402 | S-403 | A-411 | S-415 | K-416 | R-417 | V-421 |
| CCH86028 | A-416 | W-417 | S-418 | A-426 | D-430 | Q-431 | R-432 | V-436 |
| ADV67544 | A-400 | W-401 | S-402 | A-410 | K-414 | K-415 | R-416 | F-420 |
| ACZ89862 | V-412 | W-413 | S-414 | A-422 | D-426 | K-427 | R-428 | V-432 |
| ADH66252 | A-415 | W-416 | S-417 | A-425 | S-429 | R-430 | R-431 | V-435 |
| ADV80605 | V-398 | W-399 | S-400 | A-408 | S-412 | K-413 | R-414 | V-418 |
| ADW05507 | L-432 | W-433 | S-434 | A-442 | S-446 | K-447 | R-448 | V-452 |
| BAA86923 | V-384 | W-385 | S-386 | A-394 | T-398 | R-399 | R-400 | Y-404 |
| AAN05438 | V-384 | W-385 | S-386 | A-394 | T-398 | R-399 | R-400 | Y-404 |
| CAC16438 | L-429 | W-430 | S-431 | A-439 | S-443 | K-444 | R-445 | V-449 |
| CAJ89567 | L-429 | W-430 | S-431 | A-439 | S-443 | K-444 | R-445 | V-449 |
| AFD27167 | A-408 | W-409 | S-410 | A-418 | E-422 | K-423 | R-424 | V-428 |
| BAG20044 | L-426 | W-427 | S-428 | A-436 | S-440 | K-441 | R-442 | V-446 |
| ACU71435 | A-410 | W-411 | S-412 | A-420 | D-424 | K-425 | R-426 | I-430 |
| ADG87563 | V-437 | W-438 | S-439 | A-447 | H-451 | K-452 | R-453 | V-457 |
| ABI35984 | V-384 | W-385 | S-386 | A-394 | T-398 | R-399 | R-400 | Y-404 |
| CAB42553 | V-384 | W-385 | S-386 | A-394 | T-398 | R-399 | R-400 | Y-404 |
| 1UG6 | V-384 | W-385 | S-386 | A-394 | T-398 | R-399 | R-400 | Y-404 |
| CAA91220 | V-401 | W-402 | S-403 | A-411 | S-415 | K-416 | R-417 | V-421 |
| AFK85369 | L-397 | W-398 | S-399 | A-407 | S-411 | K-412 | R-413 | V-417 |
| AEN10177 | L-433 | W-434 | S-435 | A-443 | S-447 | K-448 | R-449 | V-453 |
| AEM87460 | L-418 | W-419 | S-420 | A-428 | S-432 | K-433 | R-434 | V-438 |
| AAZ81839 | V-399 | W-400 | S-401 | A-409 | T-413 | K-414 | R-415 | V-419 |
| ADU50085 | Y-443 | W-444 | S-445 | A-453 | A-457 | K-458 | R-459 | V-463 |
| AEK47062 | A-419 | W-420 | S-421 | A-429 | A-433 | K-434 | R-435 | I-439 |
| ABD68852 | A-410 | W-411 | S-412 | A-420 | I-424 | R-425 | R-426 | T-430 |
| ACL38401 | A-429 | W-430 | S-431 | S-439 | H-443 | Q-444 | R-445 | V-449 |
| ABS05424 | L-434 | W-435 | S-436 | G-444 | S-448 | K-449 | R-450 | V-454 |
| AEK43773 | Y-406 | W-407 | S-408 | A-416 | A-420 | K-421 | R-422 | V-426 |
| AEV87561 | A-392 | W-393 | S-394 | A-402 | Q-406 | R-407 | R-408 | V-412 |
| ACZ86244 | A-422 | W-423 | S-424 | A-432 | G-436 | K-437 | R-438 | V-442 |
| AEB46173 | V-417 | W-418 | S-419 | A-427 | D-431 | R-432 | R-433 | I-437 |
| BAG21567 | L-434 | W-435 | S-436 | G-444 | A-448 | K-449 | R-450 | V-454 |
| ABX05041 | V-398 | W-399 | S-400 | A-408 | S-412 | Q-413 | R-414 | I-418 |
| AFR09943 | V-429 | W-430 | S-431 | A-439 | E-443 | R-444 | R-445 | V-449 |
| ACZ89285 | C-412 | W-413 | S-414 | A-422 | D-426 | A-427 | R-428 | V-432 |
| ACV58907 | V-396 | W-397 | S-398 | A-406 | T-410 | K-411 | R-412 | V-416 |
| ADG89462 | V-378 | W-379 | S-380 | A-388 | H-392 | Q-393 | R-394 | V-398 |
| ADU09756 | Y-426 | W-427 | S-428 | A-436 | G-440 | P-441 | R-442 | A-446 |
| ACZ90607 | V-388 | W-389 | S-390 | A-398 | H-402 | Q-403 | R-404 | V-408 |
| ADG73989 | V-426 | W-427 | S-428 | A-436 | D-440 | R-441 | R-442 | V-446 |
| AEG45154 | A-465 | W-466 | S-467 | A-475 | S-479 | K-480 | R-481 | V-485 |
| AEJ43907 | V-396 | W-397 | S-398 | A-406 | T-410 | K-411 | R-412 | V-416 |
| ACZ20790 | A-443 | W-444 | S-445 | A-453 | N-457 | K-458 | R-459 | V-463 |
| CCB77455 | V-399 | W-400 | T-401 | A-409 | H-413 | Q-414 | R-415 | V-419 |
| ADL46625 | A-421 | W-422 | S-423 | A-431 | D-435 | K-436 | R-437 | V-441 |
| ADU10772 | A-421 | W-422 | S-423 | A-431 | D-435 | K-436 | R-437 | V-441 |
| ADD45899 | V-418 | W-419 | S-420 | A-428 | T-432 | K-433 | R-434 | V-438 |
| CCA53920 | A-421 | W-422 | S-423 | A-431 | D-435 | K-436 | R-437 | V-441 |
| BAJ28512 | L-435 | W-436 | S-437 | A-445 | S-449 | K-450 | R-451 | V-455 |
| ACL70277 | V-400 | W-401 | S-402 | A-410 | S-414 | K-415 | R-416 | I-420 |
| CBG72797 | L-425 | W-426 | S-427 | A-435 | G-439 | K-440 | R-441 | V-445 |
| AEW05616 | V-402 | W-403 | S-404 | A-412 | S-416 | K-417 | R-418 | I-422 |
| AEB46623 | V-393 | W-394 | S-395 | A-403 | T-407 | K-408 | R-409 | V-413 |
| 1GNX | L-429 | W-430 | S-431 | A-439 | S-443 | K-444 | R-445 | V-449 |
| ACV76621 | L-421 | W-422 | S-423 | A-431 | D-435 | R-436 | R-437 | I-441 |
| ACZ31628 | A-464 | W-465 | S-466 | A-474 | T-478 | K-479 | R-480 | V-484 |
| ADH67953 | V-409 | W-410 | S-411 | A-419 | D-423 | R-424 | R-425 | V-429 |
| ADB34290 | A-420 | W-421 | S-422 | A-430 | E-434 | K-435 | R-436 | V-440 |
| ADU09106 | V-422 | W-423 | S-424 | A-432 | T-436 | K-437 | R-438 | V-442 |
| CAA82733 | L-429 | W-430 | S-431 | A-439 | S-443 | K-444 | R-445 | V-449 |
| CBG67455 | L-446 | W-447 | S-448 | G-456 | S-460 | K-461 | R-462 | V-466 |
| CAN00920 | V-438 | W-439 | S-440 | A-448 | S-452 | K-453 | R-454 | V-458 |
| ADX71280 | A-427 | W-428 | S-429 | S-437 | H-441 | Q-442 | R-443 | V-447 |
| ACQ81085 | L-447 | W-448 | S-449 | A-457 | S-461 | K-462 | R-463 | V-467 |
| 3AHX | I-398 | W-399 | S-400 | A-408 | E-412 | K-413 | R-414 | V-418 |
| ACU35632 | A-419 | W-420 | S-421 | S-429 | E-433 | K-434 | R-435 | V-439 |
| AEV86556 | Y-408 | W-409 | S-410 | A-418 | G-422 | P-423 | R-424 | V-428 |
| AEG45006 | A-433 | W-434 | S-435 | S-443 | S-447 | K-448 | R-449 | L-453 |
| BAG18801 | A-420 | W-421 | S-422 | A-430 | D-434 | K-435 | R-436 | V-440 |
| ADI03707 | C-420 | W-421 | S-422 | A-430 | G-434 | Q-435 | R-436 | V-440 |
| CAQ00266 | V-439 | W-440 | S-441 | A-449 | S-453 | K-454 | R-455 | V-459 |
| ADD43929 | T-398 | W-399 | T-400 | A-408 | H-412 | Q-413 | R-414 | V-418 |
| ADJ49823 | A-405 | W-406 | S-407 | A-415 | T-419 | Q-420 | R-421 | V-425 |
| ABX05062 | A-404 | W-405 | S-406 | A-414 | D-418 | E-419 | R-420 | I-424 |
| ADL48215 | V-398 | W-399 | S-400 | A-408 | T-412 | K-413 | R-414 | V-418 |
| ACU70272 | T-403 | W-404 | T-405 | A-413 | H-417 | Q-418 | R-419 | V-423 |
| ADG88606 | V-424 | W-425 | S-426 | A-434 | G-438 | K-439 | R-440 | I-444 |
| AEW47954 | V-399 | W-400 | S-401 | G-409 | T-413 | Q-414 | F-415 | V-419 |
| ACD20223 | L-420 | W-421 | S-422 | A-430 | E-434 | R-435 | R-436 | V-440 |
| AFC28171 | C-398 | W-399 | S-400 | A-408 | S-412 | K-413 | R-414 | V-418 |
| ADW03239 | A-419 | W-420 | S-421 | A-429 | D-433 | K-434 | R-435 | V-439 |
| CBT74727 | V-423 | W-424 | S-425 | A-433 | A-437 | K-438 | R-439 | I-443 |
| CAM04686 | A-412 | W-413 | S-414 | A-422 | T-426 | Q-427 | R-428 | V-432 |
| ACZ20966 | A-424 | W-425 | S-426 | G-434 | D-438 | R-439 | R-440 | V-444 |
| AEV38153 | C-414 | W-415 | T-416 | A-424 | L-428 | P-429 | R-430 | I-434 |
| BAJ26623 | T-394 | W-395 | S-396 | G-404 | G-408 | E-409 | R-410 | V-414 |
| BAL91665 | A-392 | W-393 | S-394 | A-402 | T-406 | K-407 | R-408 | V-412 |
| ACV09397 | A-422 | W-423 | S-424 | G-432 | D-436 | R-437 | R-438 | I-442 |
| ADG20157 | A-393 | W-394 | S-395 | A-403 | D-407 | K-408 | R-409 | V-413 |
| ADC61565 | V-396 | W-397 | S-398 | A-406 | S-410 | K-411 | R-412 | Y-416 |
| ACM66669 | V-423 | W-424 | S-425 | A-433 | A-437 | K-438 | R-439 | I-443 |
| ABD68843 | V-398 | W-399 | S-400 | A-408 | A-412 | K-413 | R-414 | V-418 |
| ABS61373 | I-394 | W-395 | S-396 | A-404 | S-408 | K-409 | R-410 | V-414 |
| CBA30283 | Y-403 | W-404 | S-405 | A-413 | D-417 | K-418 | R-419 | V-423 |
| AAA22266 | E-401 | W-402 | S-403 | A-411 | G-415 | M-416 | R-417 | V-421 |
| CAA42814 | L-401 | W-402 | S-403 | A-411 | N-415 | K-416 | R-417 | V-421 |
| ABN51453 | L-424 | W-425 | S-426 | A-434 | N-438 | K-439 | R-440 | V-444 |
| ACZ00292 | V-398 | W-399 | S-400 | S-408 | G-412 | P-413 | R-414 | V-418 |
| AEI12946 | V-426 | W-427 | S-428 | S-436 | D-440 | R-441 | R-442 | V-446 |
| ABS15474 | A-414 | W-415 | T-416 | A-424 | T-428 | T-429 | P-430 | T-434 |
| ADL51094 | I-398 | W-399 | S-400 | A-408 | E-412 | K-413 | R-414 | V-418 |
| AFG34202 | I-394 | W-395 | S-396 | A-404 | S-408 | K-409 | R-410 | I-414 |
| AAN60220 | I-394 | W-395 | S-396 | A-404 | S-408 | K-409 | R-410 | I-414 |

| Corresp. | Sequence name | | | | | | |
|---|---|---|---|---|---|---|---|
| Sequence Pos. | L427 | E428 | T441 | L447 | A449 | E450 | K451 |
| SEQ ID NO. 379/380 | L-427 | E-428 | T-441 | L-447 | A-449 | E-450 | K-451 |
| SEQ ID NO. 378 | Q-425 | E-426 | F-439 | — | A-444 | E-445 | A-446 |
| US8101393-0094 | L-427 | E-428 | T-441 | L-447 | V-449 | D-450 | N-451 |
| US8101393-0388 | L-427 | E-428 | T-441 | L-447 | A-449 | E-450 | K-451 |
| US8101393-0172 | Q-424 | E-425 | F-438 | E-444 | G-446 | — | — |
| JP2011205992-0018 | L-425 | E-426 | F-439 | G-445 | — | — | — |
| JP2011205992-0023 | Q-422 | R-423 | F-436 | A-442 | S-444 | — | — |
| JP2011205992-0022 | Q-427 | E-428 | I-441 | — | — | — | — |
| US20110214199-58656 | Q-426 | V-427 | I-440 | G-446 | A-448 | R-449 | R-450 |
| US20110214199-62406 | Q-442 | V-443 | I-456 | G-462 | E-464 | R-465 | K-466 |
| US20110214199-47919 | Q-430 | R-431 | L-444 | — | — | L-450 | D-451 |
| US20110214199-60662 | Q-435 | R-436 | V-449 | P-455 | G-457 | — | — |
| US20110214199-36660 | Q-441 | V-442 | V-455 | V-461 | H-463 | V-464 | F-465 |
| US20110214199-17908 | L-455 | A-456 | A-469 | L-475 | G-477 | A-478 | T-479 |
| US20110214199-25308 | Q-411 | R-412 | R-425 | T-431 | G-433 | S-434 | A-435 |
| US20110214199-64004 | Q-411 | R-412 | R-425 | T-431 | G-433 | S-434 | A-435 |
| US20110214199-25023 | Q-460 | T-461 | V-474 | I-480 | G-482 | Q-483 | E-484 |
| US20110214199-52644 | Q-411 | R-412 | R-425 | L-431 | — | — | — |
| US20110214199-13862 | Q-452 | Q-453 | A-466 | L-472 | P-474 | V-475 | D-476 |
| US20110214199-29446 | Q-428 | K-429 | V-442 | I-448 | — | — | — |
| US20110214199-5988 | Q-411 | R-412 | R-425 | T-431 | — | — | — |
| US20110214199-23246 | Q-411 | R-412 | R-425 | T-431 | — | — | — |
| US20110214199-12000 | Q-425 | E-426 | L-439 | K-445 | — | — | — |
| US20110214199-56949 | Q-421 | K-422 | F-435 | — | — | — | — |
| US8101393-0272 | Q-444 | R-445 | V-458 | L-464 | G-466 | A-467 | — |
| US8101393-0014 | Q-435 | Q-436 | A-449 | — | — | F-455 | A-456 |
| US8101393-0398 | Q-454 | K-455 | V-468 | L-474 | A-476 | Q-477 | — |
| US8101393-0492 | Q-454 | K-455 | V-468 | L-474 | A-476 | Q-477 | — |
| US8101393-0400 | Q-454 | A-455 | V-468 | L-474 | A-476 | Q-477 | — |
| US8101393-0266 | L-454 | E-455 | V-468 | L-474 | A-476 | P-477 | — |
| US8101393-0366 | G-409 | R-410 | — | — | — | — | — |
| US8101393-0342 | Q-434 | R-435 | V-448 | — | — | V-454 | Q-455 |
| US8101393-0356 | Q-424 | K-425 | V-438 | — | L-444 | I-445 | D-446 |
| US8101393-0320 | L-428 | E-429 | V-442 | F-448 | — | — | — |
| US7314974-19451 | Q-428 | R-429 | L-442 | — | — | L-448 | D-449 |
| US7314974-8251 | Q-435 | T-436 | — | — | — | — | — |
| US7630836-9340 | Q-426 | V-427 | I-440 | G-446 | A-448 | R-449 | R-450 |
| US7630836-12787 | L-455 | A-456 | A-469 | L-475 | G-477 | A-478 | T-479 |
| US20090220480-0018 | Q-430 | A-431 | I-444 | L-450 | E-452 | L-453 | E-454 |
| US20120034253-0080 | Q-411 | R-412 | R-425 | L-431 | — | — | — |
| US20120034253-0077 | Q-411 | R-412 | R-425 | T-431 | — | — | — |
| US20120034253-0078 | Q-411 | R-412 | R-425 | T-431 | — | — | — |
| WO2012016960-11369 | Q-461 | Q-462 | V-475 | L-481 | — | — | — |
| US20120015408-0002 | Q-428 | K-429 | V-442 | I-448 | D-450 | — | — |
| US20120015408-0004 | Q-428 | K-429 | V-442 | I-448 | D-450 | — | — |
| US20120015408-0006 | Q-428 | K-429 | V-442 | I-448 | D-450 | — | — |
| US20120015408-0008 | Q-428 | K-429 | V-442 | I-448 | D-450 | — | — |
| US20120015408-0010 | Q-428 | K-429 | V-442 | I-448 | D-450 | — | — |
| US20120015408-0012 | Q-428 | K-429 | V-442 | I-448 | D-450 | — | — |
| US20120015408-0014 | Q-428 | K-429 | V-442 | I-448 | D-450 | — | — |
| US20120015408-0016 | Q-428 | K-429 | V-442 | I-448 | D-450 | — | — |
| US20120015408-0018 | Q-428 | K-429 | V-442 | I-448 | D-450 | — | — |
| US20120015408-0020 | Q-428 | K-429 | V-442 | I-448 | D-450 | — | — |
| US20120015408-0022 | Q-428 | K-429 | V-442 | I-448 | D-450 | — | — |
| US20120015408-0026 | Q-428 | K-429 | V-442 | I-448 | D-450 | — | — |
| US20120015408-0028 | Q-428 | K-429 | V-442 | I-448 | D-450 | — | — |
| US20120015408-0030 | Q-428 | K-429 | V-442 | I-448 | D-450 | Q-451 | — |
| US20120015408-0032 | Q-428 | K-429 | V-442 | I-448 | D-450 | Q-451 | — |
| US20120015408-0034 | Q-428 | K-429 | V-442 | I-448 | D-450 | Q-451 | — |
| US20120015408-0036 | Q-428 | K-429 | V-442 | I-448 | D-450 | — | — |
| US20120015408-0038 | Q-428 | K-429 | V-442 | I-448 | D-450 | Q-451 | — |
| US20120015408-0040 | Q-428 | K-429 | V-442 | I-448 | D-450 | — | — |
| US20120015408-0042 | Q-428 | K-429 | V-442 | I-448 | D-450 | Q-451 | — |
| US20120015408-0044 | Q-428 | K-429 | V-442 | I-448 | D-450 | — | — |
| US20120015408-0046 | Q-428 | K-429 | V-442 | I-448 | D-450 | Q-451 | — |
| US20120015408-0048 | Q-428 | K-429 | V-442 | I-448 | D-450 | Q-451 | — |
| US20120015408-0050 | Q-428 | K-429 | V-442 | I-448 | D-450 | Q-451 | — |
| US20120015408-0052 | Q-428 | N-429 | V-442 | I-448 | D-450 | Q-451 | — |
| US20120015408-0054 | Q-428 | K-429 | V-442 | I-448 | D-450 | — | — |
| US20120015408-0056 | Q-428 | K-429 | V-442 | I-448 | D-450 | Q-451 | — |
| US20120015408-0058 | Q-428 | K-429 | V-442 | I-448 | D-450 | — | — |
| US20120015408-0060 | Q-428 | K-429 | V-442 | I-448 | D-450 | Q-451 | — |
| US20120015408-0062 | Q-428 | K-429 | V-442 | I-448 | D-450 | Q-451 | — |
| US20120015408-0064 | Q-428 | K-429 | V-442 | I-448 | D-450 | — | — |
| US20120015408-0066 | Q-428 | K-429 | V-442 | I-448 | D-450 | — | — |
| US20120015408-0068 | Q-428 | K-429 | V-442 | I-448 | D-450 | Q-451 | — |
| US20120015408-0070 | Q-428 | K-429 | V-442 | I-448 | D-450 | Q-451 | — |
| US20120015408-0072 | Q-428 | K-429 | V-442 | I-448 | D-450 | Q-451 | — |
| US20120015408-0074 | Q-428 | K-429 | V-442 | I-448 | D-450 | Q-451 | — |
| US20120015408-0076 | Q-428 | K-429 | V-442 | I-448 | D-450 | Q-451 | — |
| US20120015408-0078 | Q-428 | K-429 | V-442 | I-448 | D-450 | Q-451 | — |
| US20120015408-0080 | Q-428 | K-429 | V-442 | I-448 | D-450 | — | — |
| US20120015408-0082 | Q-428 | K-429 | V-442 | I-448 | D-450 | Q-451 | — |
| US20120015408-0086 | Q-428 | K-429 | V-442 | I-448 | D-450 | — | — |
| US20120015408-0084 | Q-428 | K-429 | V-442 | I-448 | D-450 | — | — |
| US20120015408-0088 | Q-428 | K-429 | V-442 | I-448 | D-450 | Q-451 | — |
| US20120015408-0090 | Q-428 | K-429 | V-442 | I-448 | D-450 | Q-451 | — |
| US20120015408-0092 | Q-428 | K-429 | V-442 | I-448 | D-450 | Q-451 | — |
| US20120015408-0094 | Q-428 | K-429 | V-442 | I-448 | D-450 | — | — |
| US20120015408-0096 | Q-428 | K-429 | V-442 | I-448 | D-450 | — | — |
| US20120015408-0098 | Q-428 | K-429 | V-442 | I-448 | D-450 | Q-451 | — |
| US20120015408-0100 | Q-428 | K-429 | V-442 | I-448 | D-450 | Q-451 | — |
| US20120015408-0102 | Q-428 | K-429 | V-442 | I-448 | D-450 | Q-451 | — |
| US20120015408-0104 | Q-428 | K-429 | V-442 | I-448 | D-450 | Q-451 | — |
| US20120015408-0106 | Q-428 | K-429 | V-442 | I-448 | D-450 | Q-451 | — |
| US20120015408-0108 | Q-428 | K-429 | V-442 | I-448 | D-450 | Q-451 | — |
| US20120015408-0110 | Q-428 | K-429 | V-442 | I-448 | D-450 | Q-451 | — |
| US20120015408-0112 | Q-428 | K-429 | V-442 | I-448 | D-450 | Q-451 | — |
| US20120015408-0114 | Q-428 | K-429 | V-442 | I-448 | D-450 | Q-451 | — |
| US20120015408-0116 | Q-428 | K-429 | V-442 | I-448 | D-450 | Q-451 | — |
| US20120015408-0118 | Q-428 | K-429 | A-442 | I-448 | D-450 | P-451 | — |
| US20120015408-0120 | Q-428 | K-429 | V-442 | I-448 | D-450 | Q-451 | — |
| US20120015408-0122 | Q-428 | K-429 | V-442 | I-448 | D-450 | Q-451 | — |
| US20120015408-0124 | Q-428 | K-429 | V-442 | I-448 | D-450 | — | — |
| US8202716-0464 | L-426 | A-427 | V-440 | L-446 | P-448 | A-449 | E-450 |
| US20110262988-0002 | L-428 | E-429 | V-442 | F-448 | E-450 | H-451 | H-452 |
| US20110262988-0003 | L-451 | E-452 | V-465 | F-471 | — | — | — |
| US20110151538-0130 | L-480 | E-481 | V-494 | F-500 | E-502 | H-503 | H-504 |
| US20100003234-0048 | Q-428 | K-429 | V-442 | L-448 | L-450 | — | — |
| US6184018-0012 | L-428 | E-429 | V-442 | F-448 | — | — | — |
| US6377893-0063 | L-423 | E-424 | V-437 | — | — | — | — |
| ACJ34717 | L-438 | E-439 | T-452 | L-458 | D-460 | Q-461 | — |
| ADD27066 | Q-422 | R-423 | F-436 | A-442 | S-444 | — | — |
| ACZ42845 | L-431 | E-432 | V-445 | L-451 | P-453 | T-454 | E-455 |
| ABQ91969 | Q-425 | R-426 | V-439 | V-445 | E-447 | G-448 | — |
| ABTJ56651 | Q-425 | R-426 | V-439 | L-445 | E-447 | T-448 | Q-449 |
| AEY92801 | Q-428 | V-429 | I-442 | G-448 | T-450 | R-451 | R-452 |
| CAD55382 | Q-442 | V-443 | I-456 | G-462 | E-464 | R-465 | K-466 |
| AD073143 | Q-434 | Q-435 | V-448 | — | — | L-454 | S-455 |
| CCA60311 | Q-444 | R-445 | V-458 | L-464 | G-466 | A-467 | — |
| ADI15206 | Q-432 | E-433 | V-446 | Q-452 | L-454 | E-455 | V-456 |
| ADI12494 | Q-428 | A-429 | I-442 | D-448 | A-450 | R-451 | H-452 |
| ACU35736 | Q-443 | V-444 | V-457 | L-463 | A-465 | P-466 | S-467 |
| BAC69512 | Q-426 | V-427 | I-440 | G-446 | A-448 | R-449 | R-450 |
| AEN08263 | Q-428 | K-429 | I-442 | — | A-445 | H-446 | R-447 |
| CCA53915 | Q-452 | R-453 | H-466 | G-472 | A-474 | H-475 | R-476 |
| CAJ88063 | Q-428 | A-429 | I-442 | — | A-445 | H-446 | R-447 |
| ABF87202 | Q-430 | R-431 | L-444 | — | — | L-450 | D-451 |
| BAJ30040 | Q-425 | V-426 | L-439 | A-445 | A-447 | — | — |
| ACO44852 | Q-419 | E-420 | L-433 | V-439 | A-441 | D-442 | — |
| AFO59750 | Q-436 | V-437 | I-450 | L-456 | — | — | — |
| BAJ31549 | Q-470 | R-471 | V-484 | L-490 | Q-492 | — | — |
| ACY97307 | Q-458 | R-459 | V-472 | L-478 | D-480 | R-481 | H-482 |
| ACM06095 | L-429 | S-430 | I-443 | L-449 | E-451 | G-452 | — |
| AEI64652 | Q-430 | R-431 | L-444 | — | — | L-450 | D-451 |
| BAG17581 | Q-442 | R-443 | L-456 | E-462 | R-464 | G-465 | G-466 |
| AEM83530 | Q-428 | T-429 | I-442 | G-448 | A-450 | R-451 | R-452 |
| ADG89307 | Q-438 | A-439 | F-452 | P-458 | G-460 | P-461 | D-462 |
| ABG04991 | Q-435 | R-436 | V-449 | P-455 | G-457 | — | — |
| ABP54026 | Q-455 | A-456 | T-469 | L-475 | A-477 | Q-478 | — |
| ABV97405 | Q-455 | V-456 | V-469 | L-475 | A-477 | Q-478 | — |
| ADH60167 | Q-425 | K-426 | V-439 | I-445 | E-447 | — | — |
| ADV80493 | Q-425 | K-426 | V-439 | I-445 | — | — | — |
| AEM77729 | Q-425 | K-426 | V-439 | I-445 | Y-447 | — | — |
| ABK71329 | Q-441 | V-442 | V-455 | V-461 | H-463 | V-464 | F-465 |
| ACZ89864 | Q-451 | R-452 | V-465 | L-471 | G-473 | N-474 | — |
| BAC72965 | L-455 | A-456 | A-469 | L-475 | G-477 | A-478 | T-479 |
| ADD25173 | Q-426 | K-427 | V-440 | M-446 | — | — | — |
| ABF44291 | Q-427 | T-428 | F-441 | — | — | — | — |
| AEY93261 | Q-445 | R-446 | M-459 | G-465 | — | — | — |
| 1NP2 | Q-411 | R-412 | R-425 | T-431 | G-433 | S-434 | A-435 |
| AEG34643 | Q-411 | R-412 | R-425 | T-431 | G-433 | S-434 | A-435 |
| AFR07907 | Q-442 | E-443 | L-456 | F-462 | E-464 | R-465 | — |
| AEB43702 | Q-454 | T-455 | V-468 | L-474 | A-476 | Q-477 | — |
| BAL92882 | Q-446 | Q-447 | V-460 | L-466 | — | — | — |
| CCA59876 | L-454 | E-455 | V-468 | L-474 | A-476 | P-477 | — |
| ACU74192 | G-448 | K-449 | I-462 | S-468 | L-470 | — | — |
| ABV96319 | Q-447 | R-448 | V-461 | L-467 | — | — | — |
| AF053528 | G-455 | T-456 | V-469 | L-475 | G-477 | A-478 | — |
| AFH40090 | Q-411 | R-412 | R-425 | T-431 | G-433 | S-434 | A-435 |
| ADL49193 | Q-435 | R-436 | V-449 | L-455 | — | — | — |
| AFE08200 | Q-430 | Q-431 | V-444 | — | — | L-450 | D-451 |
| AAN05441 | Q-411 | R-412 | R-425 | T-431 | G-433 | S-434 | A-435 |
| CAJ90043 | Q-439 | E-440 | M-453 | G-459 | — | — | — |
| AEY89575 | L-448 | E-449 | A-462 | L-468 | P-470 | V-471 | A-472 |
| AAF37730 | Q-460 | T-461 | V-474 | I-480 | G-482 | Q-483 | E-484 |
| BAL98072 | Q-432 | A-433 | V-446 | — | — | V-452 | E-453 |
| AAN05440 | Q-411 | R-412 | R-425 | L-431 | — | — | — |
| AEM77895 | Q-425 | K-426 | V-439 | I-445 | E-447 | — | — |
| ADB34272 | Q-450 | T-451 | L-464 | L-469 | T-471 | — | — |
| ABW87307 | Q-411 | R-412 | R-425 | T-431 | — | — | — |
| AF322365_1 | Q-411 | R-412 | R-425 | L-431 | — | — | — |
| CAC10107 | Q-452 | Q-453 | A-466 | L-472 | P-474 | V-475 | D-476 |
| AEB47478 | Q-437 | R-438 | V-451 | L-457 | — | — | — |
| ADL45220 | Q-454 | A-455 | V-468 | L-474 | A-476 | Q-477 | — |
| ABK51908 | Q-455 | E-456 | V-469 | I-475 | A-477 | P-478 | — |
| CAN94460 | Q-435 | R-436 | V-449 | — | — | V-455 | D-456 |
| AEF18219 | Q-423 | K-424 | V-437 | I-443 | N-445 | I-446 | — |
| ADD39191 | Q-466 | A-467 | L-480 | L-486 | R-488 | E-489 | — |
| ABP52811 | Q-446 | R-447 | V-460 | L-466 | — | — | — |
| AEV88819 | Q-461 | Q-462 | V-475 | L-481 | — | — | — |
| AEY89570 | Q-458 | R-459 | V-472 | L-478 | A-480 | — | — |
| ADD01635 | Q-425 | K-426 | V-439 | I-445 | E-447 | — | — |
| CAB95278 | Q-439 | R-440 | M-453 | G-459 | — | — | — |
| AEN13042 | L-439 | E-440 | L-453 | A-459 | — | — | — |
| ACY97750 | Q-444 | R-445 | V-458 | R-464 | H-466 | Q-467 | A-468 |
| ADI10010 | Q-444 | T-445 | V-458 | V-464 | D-466 | A-467 | — |
| CCB72805 | Q-452 | V-453 | V-466 | L-472 | P-474 | A-475 | G-476 |
| ACY14034 | Q-446 | K-447 | A-460 | A-466 | — | — | — |
| AAZ55664 | L-439 | E-440 | L-453 | A-459 | H-461 | R-462 | G-463 |
| ADW02698 | L-439 | E-440 | L-453 | A-459 | — | — | — |
| ABC33525 | Q-418 | Q-419 | F-432 | A-438 | — | — | — |
| ADB34282 | G-426 | T-427 | L-440 | E-446 | — | — | — |
| AAM23648 | Q-428 | K-429 | V-442 | I-448 | — | — | — |
| CCH86028 | Q-443 | V-444 | V-457 | D-463 | V-465 | — | — |
| ADV67544 | Q-427 | M-428 | F-441 | A-447 | H-449 | A-450 | P-451 |
| ACZ89862 | Q-439 | N-440 | V-453 | L-459 | — | — | — |
| ADH66252 | Q-442 | R-443 | L-456 | F-462 | E-464 | R-465 | Q-466 |
| ADV80605 | Q-425 | K-426 | V-439 | I-445 | D-447 | — | — |
| ADW05507 | Q-459 | R-460 | V-473 | L-479 | P-481 | — | V-482 |
| BAA86923 | Q-411 | R-412 | — | — | — | — | — |
| AAN05438 | Q-411 | R-412 | R-425 | T-431 | — | — | — |
| CAC16438 | G-456 | T-457 | V-470 | L-476 | G-478 | A-479 | — |
| CAJ89567 | G-456 | T-457 | V-470 | L-476 | G-478 | A-479 | — |
| AFD27167 | Q-435 | E-436 | F-449 | — | — | — | — |
| BAG20044 | Q-453 | R-454 | A-467 | L-473 | R-475 | — | — |
| ACU71435 | Q-437 | T-438 | T-451 | R-457 | R-459 | G-460 | D-461 |
| ADG87563 | M-464 | R-465 | V-478 | L-484 | N-486 | G-487 | E-488 |
| ABI35984 | Q-411 | R-412 | R-425 | T-431 | — | — | — |
| CAB42553 | Q-411 | R-412 | R-425 | T-431 | — | — | — |
| 1UG6 | Q-411 | R-412 | R-425 | T-431 | — | — | — |
| CAA91220 | Q-428 | K-429 | V-442 | I-448 | D-450 | — | — |
| AFK85369 | Q-424 | K-425 | V-438 | I-444 | F-446 | — | — |
| AEN10177 | Q-460 | R-461 | V-474 | L-480 | P-482 | G-483 | D-484 |
| AEM87460 | Q-445 | A-446 | V-459 | L-465 | A-467 | A-468 | — |
| AAZ81839 | L-426 | A-427 | V-440 | L-446 | P-448 | A-449 | E-450 |
| ADU50085 | Q-470 | E-471 | I-484 | L-490 | V-492 | V-493 | S-494 |
| AEK47062 | Q-446 | Q-447 | T-460 | G-466 | — | — | — |
| ABD68852 | Q-437 | Q-438 | F-451 | — | — | — | — |
| ACL38401 | Q-456 | D-457 | V-470 | L-476 | A-478 | G-479 | S-480 |
| ABS05424 | Q-461 | E-462 | V-475 | L-481 | A-483 | A-484 | D-485 |
| AEK43773 | Q-433 | R-434 | V-447 | L-453 | — | — | — |
| AEV87561 | Q-419 | R-420 | R-433 | — | — | — | — |
| ACZ86244 | Q-449 | L-450 | T-463 | L-469 | G-471 | P-472 | A-473 |
| AEB46173 | Q-444 | Q-445 | L-458 | L-464 | — | — | — |
| BAG21567 | Q-461 | L-462 | V-475 | L-481 | P-483 | E-484 | A-485 |
| ABX05041 | Q-425 | Q-426 | V-439 | — | — | V-445 | Q-446 |
| AFR09943 | L-456 | T-457 | L-470 | R-476 | R-478 | A-479 | T-480 |
| ACZ89285 | Q-439 | A-440 | F-453 | — | — | — | — |
| ACV58907 | L-423 | A-424 | V-437 | L-443 | P-445 | A-446 | E-447 |
| ADG89462 | G-405 | A-406 | L-419 | G-425 | G-427 | P-428 | E-429 |
| ADU09756 | G-453 | S-454 | R-467 | K-473 | T-475 | S-476 | T-477 |
| ACZ90607 | G-415 | E-416 | R-429 | G-435 | R-437 | — | — |
| ADG73989 | Q-453 | V-454 | L-467 | I-473 | T-475 | P-476 | E-477 |
| AEG45154 | Q-492 | E-493 | V-506 | L-512 | A-514 | R-515 | T-516 |
| AEJ43907 | L-423 | A-424 | V-437 | L-443 | P-445 | M-446 | E-447 |
| ACZ20790 | Q-470 | E-471 | V-484 | V-490 | P-492 | R-493 | G-494 |
| CCB77455 | Q-426 | E-427 | L-440 | G-446 | R-448 | T-449 | — |
| ADL46625 | Q-448 | R-449 | T-462 | G-468 | R-470 | — | — |
| ADU10772 | Q-448 | R-449 | T-462 | G-468 | R-470 | — | — |
| ADD45899 | Q-445 | R-446 | L-459 | — | — | — | — |
| CCA53920 | Q-448 | T-449 | T-462 | A-468 | G-470 | G-471 | H-472 |
| BAJ28512 | Q-462 | R-463 | V-476 | L-482 | — | — | — |
| ACL70277 | N-428 | R-429 | V-442 | V-448 | A-450 | N-451 | — |
| CBG72797 | L-452 | T-453 | A-466 | L-472 | P-474 | L-475 | A-476 |
| AEW05616 | Q-429 | T-430 | M-443 | — | — | — | — |
| AEB46623 | G-420 | R-421 | V-434 | R-440 | T-442 | A-443 | R-444 |
| 1GNX | G-456 | T-457 | V-470 | L-476 | T-478 | A-479 | — |
| ACV76621 | Q-448 | E-449 | L-462 | L-468 | P-470 | V-471 | D-472 |
| ACZ31628 | Q-491 | E-492 | V-505 | V-511 | A-513 | R-514 | R-515 |
| ADH67953 | L-436 | E-437 | F-450 | A-456 | R-458 | V-459 | Q-460 |
| ADB34290 | Q-447 | A-448 | L-461 | R-467 | — | — | — |
| ADU09106 | Q-449 | R-450 | L-463 | — | — | — | — |
| CAA82733 | G-456 | T-457 | V-470 | L-476 | T-478 | A-479 | — |
| CBG67455 | G-473 | T-474 | V-487 | L-493 | G-495 | A-496 | — |
| CAN00920 | Q-465 | E-466 | L-479 | I-485 | P-487 | V-488 | D-489 |
| ADX71280 | Q-454 | E-455 | V-468 | V-474 | D-476 | A-477 | D-478 |
| ACQ81085 | L-474 | R-475 | V-488 | L-494 | V-496 | D-497 | G-498 |
| 3AHX | Q-425 | E-426 | L-439 | K-445 | E-447 | H-448 | H-449 |
| ACU35632 | Q-446 | V-447 | V-460 | E-466 | — | — | — |
| AEV86556 | G-435 | E-436 | R-449 | G-455 | — | — | — |
| AEG45006 | G-460 | E-461 | L-474 | L-480 | G-482 | L-483 | T-484 |
| BAG18801 | Q-447 | V-448 | T-461 | R-467 | R-469 | A-470 | — |
| ADI03707 | Q-447 | E-448 | L-461 | A-467 | T-469 | Q-470 | E-471 |
| CAQ00266 | Q-466 | E-467 | L-480 | I-486 | A-488 | V-489 | D-490 |
| ADD43929 | Q-425 | K-426 | M-439 | A-445 | — | — | — |
| ADJ49823 | Q-432 | R-433 | V-446 | L-452 | T-454 | P-455 | A-456 |
| ABX05062 | Q-431 | K-432 | I-445 | L-451 | S-453 | L-454 | P-455 |
| ADL48215 | Q-425 | R-426 | L-439 | — | — | — | — |
| ACU70272 | Q-430 | T-431 | R-444 | A-450 | E-452 | G-453 | — |
| ADG88606 | Q-451 | R-452 | L-465 | L-471 | R-473 | D-474 | A-475 |
| AEW47954 | Q-426 | R-427 | V-440 | V-446 | — | — | — |
| ACD20223 | Q-447 | K-448 | F-461 | A-467 | T-469 | E-470 | — |
| AFC28171 | Q-425 | I-426 | L-439 | — | — | A-444 | L-445 |
| ADW03239 | Q-446 | L-447 | T-460 | N-466 | R-468 | T-469 | D-470 |
| CBT74727 | Q-450 | V-451 | L-464 | T-470 | A-472 | — | — |
| CAM04686 | Q-439 | Q-440 | I-453 | — | V-459 | P-460 | A-461 |
| ACZ20966 | F-451 | E-452 | L-465 | L-471 | A-473 | V-474 | D-475 |
| AEV38153 | Q-441 | K-442 | V-455 | G-461 | L-463 | Q-464 | K-465 |
| BAJ26623 | Q-421 | R-422 | L-435 | A-441 | S-443 | A-444 | A-445 |
| BAL91665 | Q-419 | M-420 | R-433 | — | — | — | — |
| ACV09397 | L-449 | E-450 | V-463 | L-469 | G-471 | V-472 | T-473 |
| ADG20157 | Q-420 | E-421 | V-434 | G-440 | A-442 | A-443 | V-444 |
| ADC61565 | R-423 | T-424 | V-437 | A-443 | V-445 | R-446 | P-447 |
| ACM66669 | Q-450 | V-451 | L-464 | T-470 | A-472 | — | — |
| ABD68843 | Q-425 | E-426 | F-439 | R-445 | G-447 | M-448 | — |
| ABS61373 | Q-421 | K-422 | F-435 | — | — | — | — |
| CBA30283 | Q-430 | Q-431 | F-444 | K-450 | — | — | — |
| AAA22266 | L-428 | V-429 | V-442 | L-448 | L-450 | — | — |
| CAA42814 | L-428 | E-429 | V-442 | F-448 | — | — | — |
| ABN51453 | L-451 | E-452 | V-465 | F-471 | — | — | — |
| ACZ00292 | Q-425 | R-426 | H-439 | R-445 | S-447 | — | — |
| AEI12946 | L-453 | E-454 | L-467 | I-473 | P-475 | I-476 | E-477 |
| ABS15474 | Q-441 | E-442 | I-455 | N-461 | E-463 | T-464 | R-465 |
| ADL51094 | Q-425 | E-426 | L-439 | K-445 | — | — | — |
| AFG34202 | Q-421 | K-422 | F-435 | — | — | — | — |
| AAN60220 | Q-421 | K-422 | F-435 | — | — | — | — |

### SPECIFIC EMBODIMENTS AND INCORPORATION BY REFERENCE

[0161] All publications, patents, patent applications and other documents cited in this application are hereby incorporated by reference in their entireties for all purposes to the same extent as if each individual publication, patent, patent application or other document were individually indicated to be incorporated by reference for all purposes.

[0162] While various specific embodiments have been illustrated and described, it will be appreciated that various changes can be made without departing from the spirit and scope of the invention(s) described herein.

The application's sequence listing, which the Patent Office published only in electronic form, follows.

SEQUENCE LISTING (381 sequences)

SEQ ID NO: 1 - DNA, 1386 bp, Artificial Sequence
  Derived by Lab Evolution
atgcttcagtttccgaaagattttatttggggagctgcaacttcatcgtatcaaattgaaggaacagcgactggagaagataaaatttactcgatctgggatcacttttcccgcattcctggcaaaatagcgaatggggataatggcgatattgcaattgatcattacaatcgttatgttgaagacatcgcattaatgaaagcgcttcatttgaaagcgtatcgattttcgactagttgggcgagactttattgtgaaacgccagggaagtttaacgaaaaaggtttagatttttataagcgtcttgtaaatgagctgctagagaacggtatcgagccaatgttgaccatttatcattgggatatgccacaagctcttcaagagaaaggtggctgggaaaatcgtgatatcgttcaatacttccaagaatacgctgctttcctttacgagaatcttggggatgtcgtgaaaaaatggattacgcataatgagccgtgggttgtcacctatttaggatatgggaatggcgaacatgccccagggattcaaaactttacatcatttttaaaagcagcacatcatgttcttctctcacacggggaagcggtaaaagcgtttcgagcaatcggtccgaaagatggggaaattggtattacgttgaatttgacacctggatatgcggttgatccgaaagatgaaaaagcagttgatgccgctcgaaaatgggacggctttatgaatcgttggtttttagatcctgtatttaagggacaatatccagcagatatgttagaagtgtataaagattatttaccagacgtttacaaagagggagatttacaaacgattcagcaaccgatcgactttttcggatttaactattattcaacagcaacattaaaagattggaaaaaaggtgaccgtgaaccgatcgtatttgaacatgtgagcacaggaagacctgtgacggatatgaattgggaagtgaatccaaacggtttgtttgatttaatggtgcgattgaaaaaagattatggcgatattccattatacattaccgaaaacggtgctgcatacaaagatcgcgtcaacgaacaaggtgaagtagaagatgatgagcgagttgcttatatacgagagcatttaatcgcttgccaccgcgcgattgaacaaggcgtcaatttaaaaggatattatgtatggtcgctgttcgataattttgagtggcggtttggatatgataagcgctttgggattgtatacgtggattatgaaacgctagagcgcatcccgaaaaagagtgcattatggtataaggaaacgattataaacaacggattgaaagcagaaaaagataaaagatctcatcaccatcaccatcactaa

SEQ ID NO: 2 - DNA, 1386 bp, Artificial Sequence
  Derived by Lab Evolution
atgcttcagtttccgaaagattttatttggggagctgcaacttcatcgtatcaaattgaaggaacagcgactggagaagataaaatttactcgatctgggatcacttttcccgcattcctggcaaaatagcgaatggggataatggcgatattgcaattgatcattacaatcgttatgttgaagacatcgcattaatgaaagcgcttcatttgaaagcgtatcgattttcgactagttgggcgagactttattgtgaaacgccagggaagtttaacgaaaaaggtttagatttttataagcgtcttgtaaatgagctgctagagaacggtatcgagccaatgttgaccatttatcattgggatatgccacaagctcttcaagagaaaggtggctgggaaaatcgtgatatcgttcaatacttccaagaatacgctgctttcctttacgagaatcttggggatgtcgtgaaaaaatggattacgcataatgagccgtgggttgtcacctatttaggatatgggaatggcgaacatgccccagggattcaaaactttacatcatttttaaaagcagcacatcatgttcttctctcacacggggaagcggtaaaagcgtttcgagcaatcggtccgaaagatggggaaattggtattacgttgaatttgacacctggatatgcggttgatccgaaagatgaaaaagcagttgatgccgctcgaaaatgggacggctttatgaatcgttggtttttagatcctgtatttaagggacaatatccagcagatatgttagaagtgtataaagattatttaccagacgtttacaaagagggagatttacaaacgattcagcaaccgatcgactttttcggatttaactattattcaacagcaacattaaaagattggaaaaaaggtgaccgtgaaccgatcgtatttgaacatgtgagcacaggaagacctgtgacggatatgaattgggaagtgaatccaaacggtttgtttgatttaatggtgcgattgaaaaaagattatggcgatattccattatacattaccgaaaacggtgctgcatacaaagatcgcgtcaacgaacaaggtgaagtagaagatgatgagcgagttgcttatatacgagagcatttaatcgcttgccaccgcgcgattgaacaaggcgtcaatttaaaaggatattatgtatggtcgctgttcgataattttgagtggacatttggatatgataagcgctttgggattgtatacgtggattatgaaacgctagagcgcatcccgaaaaagagtgcattatggtataaggaaacgattataaacaacggattgaaagcagaacaggataaaagatctcatcaccatcaccatcactaa

SEQ ID NO: 3 - DNA, 1386 bp, Artificial Sequence
  Derived by Lab Evolution
atgcttcagtttccgaaagattttatttggggagctgcaacttcatcgtatcaaattgaaggaacagcgactggagaagataaaatttactcgatctgggatcacttttcccgcattcctggcaaaatagcgaatggggataatggcgatattgcaattgatcattacaatcgttatgttgaagacatcgcattaatgaaagcgcttcatttgaaagcgtatcgattttcgactagttgggcgagactttattgtgaaacgccagggaagtttaacgaaaaaggtttagatttttataagcgtcttgtaaatgagctgctagagaacggtatcgagccaatgttgaccatttatcattgggatatgccacaagctcttcaagagaaaggtggctgggaaaatcgtgatatcgttcaatacttccaagaatacgctgctttcctttacgagaatcttggggatgtcgtgaaaaaatggattacgcataatgagccgtgggttgtcacctatttaggatatgggaatggcgaacatgccccagggattcaaaactttacatcatttttaaaagcagcacatcatgttcttctctcacacggggaagcggtaaaagcgtttcgagcaatcggtccgaaagatggggaaattggtattacgttgaatttgacacctggatatgcggttgatccgaaagatgaaaaagcagttgatgccgctcgaaaatgggacggctttatgaatcgttggtttttagatcctgtatttaagggacaatatccagcagatatgttagaagtgtataaagattatttaccagacgtttacaaagagggagatttacaaacgattcagcaaccgatcgactttttcggatttaactattattcaacagcaacattaaaagattggaaaaaaggtgaccgtgaaccgatcgtatttgaacatgtgagcacaggaagacctgtgacggatatgaattgggaagtgaatccaaacggtttgtttgatttaatggtgcgattgaaaaaagattatggcgatattccattatacattaccgaaaacggtgctgcatacaaagatcgcgtcaacgaacaaggtgaagtagaagatgatgagcgagttgcttatatacgagagcatttaatcgcttgccaccgcgcgattgaacaaggcgtcaatttaaaaggatattatgtatggtcgctgttcgataattttgagtgggcatttggatatgataagcgctttgggattgtatacgtggattatgaaacgctagagcgcatcccgaaaaagagtgctttatggtataaggaaacgattataaacaacggattgaaagcagaaaaagataaaagatctcatcaccatcaccatcactaa

SEQ ID NO: 4 - DNA, 1386 bp, Artificial Sequence
  Derived by Lab Evolution
atgcttcagtttccgaaagattttatttggggagctgcaacttcatcgtatcaaattgaaggaacagcgactggagaagataaaatttactcgatctgggatcacttttcccgcattcctggcaaaatagcgaatggggataatggcgatattgcaattgatcattacaatcgttatgttgaagacatcgcattaatgaaagcgcttcatttgaaagcgtatcgattttcgactagttgggcgagactttattgtgaaacgccagggaagtttaacgaaaaaggtttagatttttataagcgtcttgtaaatgagctgctagagaacggtatcgagccaatgttgaccatttatcattgggatatgccacaagctcttcaagagaaaggtggctgggaaaatcgtgatatcgttcaatacttccaagaatacgctgctttcctttacgagaatcttggggatgtcgtgaaaaaatggattacgcataatgagccgtgggttgtcacctatttaggatatgggaatggcgaacatgccccagggattcaaaactttacatcatttttaaaagcagcacatcatgttcttctctcacacggggaagcggtaaaagcgtttcgagcaatcggtccgaaagatggggaaattggtattacgttgaatttgacacctggatatgcggttgatccgaaagatgaaaaagcagttgatgccgctcgaaaatgggacggctttatgaatcgttggtttttagatcctgtatttaagggacaatatccagcagatatgttagaagtgtataaagattatttaccagacgtttacaaagagggagatttacaaacgattcagcaaccgatcgactttttcggatttaactattattcaacagcaacattaaaagattggaaaaaaggtgaccgtgaaccgatcgtatttgaacatgtgagcacaggaagacctgtgacggatatgaattgggaagtgaatccaaacggtttgtttgatttaatggtgcgattgaaaaaagattatggcgatattccattatacattaccgaaaacggtgctgcatacaaagatcgcgtcaacgaacaaggtgaagtagaagatgatgagcgagttgcttatatacgagagcatttaatcgcttgccaccgcgcgattgaacaaggcgtcaatttaaaaggatattatgtatggtcgctgttcgataattttgagtgggcatttggatatgataagcgctttgggattgtatacgtggattatgaaacgctagagcgcatcccgaaaaagagtgcattatggtataaggaaacgattataaacaacggattgaaataggaaaaagataaaagatctcatcaccatcaccatcactaa

SEQ ID NO: 5 - DNA, 1386 bp, Artificial Sequence
  Derived by Lab Evolution
atgcttcagtttccgaaagattttatttggggagctgcaacttcatcgtatcaaattgaaggaacagcgactggagaagataaaatttactcgatctgggatcacttttcccgcattcctggcaaaatagcgaatggggataatggcgatattgcaattgatcattacaatcgttatgttgaagacatcgcattaatgaaagcgcttcatttgaaagcgtatcgattttcgactagttgggcgagactttattgtgaaacgccagggaagtttaacgaaaaaggtttagatttttataagcgtcttgtaaatgagctgctagagaacggtatcgagccaatgttgaccatttatcattgggatatgccacaagctcttcaagagaaaggtggctgggaaaatcgtgatatcgttcaatacttccaagaatacgctgctttcctttacgagaatcttggggatgtcgtgaaaaaatggattacgcataatgagccgtgggttgtcacctatttaggatatgggaatggcgaacatgccccagggattcaaaactttacatcatttttaaaagcagcacatcatgttcttctctcacacggggaagcggtaaaagcgtttcgagcaatcggtccgaaagatggggaaattggtattacgttgaatttgacacctggatatgcggttgatccgaaagatgaaaaagcagttgatgccgctcgaaaatgggacggctttatgaatcgttggtttttagatcctgtatttaagggacaatatccagcagatatgttagaagtgtataaagattatttaccagacgtttacaaagagggagatttacaaacgattcagcaaccgatcgactttttcggatttaactattattcaacagcaacattaaaagattggaaaaaaggtgaccgtgaaccgatcgtatttgaacatgtgagcacaggaagacctgtgacggatatgaattgggaagtgaatccaaacggtttgtttgatttaatggtgcgattgaaaaaagattatggcgatattccattatacattaccgaaaacggtgctgcatacaaagatcgcgtcaacgaacaaggtgaagtagaagatgatgagcgagttgcttatatacgagagcatttaatcgcttgccaccgcgcgattgaacaaggcgtcaatttaaaaggatattatgtatggtcgctgttcgataattttgagtgggcatttggatatgataagcgctttgggattgtatacgtggattatgaaacgctagagcgcatcccgaaaaagagtgcattatggtataaggaaacgattataaacaacggattgaaatgtgaaaaagataaaagatctcatcaccatcaccatcactaa

SEQ ID NO: 6 - DNA, 1386 bp, Artificial Sequence
  Derived by Lab Evolution
atgcttcagtttccgaaagattttatttggggagctgcaacttcatcgtatcaaattgaaggaacagcgactggagaagataaaatttactcgatctgggatcacttttcccgcattcctggcaaaatagcgaatggggataatggcgatattgcaattgatcattacaatcgttatgttgaagacatcgcattaatgaaagcgcttcatttgaaagcgtatcgattttcgactagttgggcgagactttattgtgaaacgccagggaagtttaacgaaaaaggtttagatttttataagcgtcttgtaaatgagctgctagagaacggtatcgagccaatgttgaccatttatcattgggatatgccacaagctcttcaagagaaaggtggctgggaaaatcgtgatatcgttcaatacttccaagaatacgctgctttcctttacgagaatcttggggatgtcgtgaaaaaatggattacgcataatgagccgtgggttgtcacctatttaggatatgggaatggcgaacatgccccagggattcaaaactttacatcatttttaaaagcagcacatcatgttcttctctcacacggggaagcggtaaaagcgtttcgagcaatcggtccgaaagatggggaaattggtattacgttgaatttgacacctggatatgcggttgatccgaaagatgaaaaagcagttgatgccgctcgaaaatgggacggctttatgaatcgttggtttttagatcctgtatttaagggacaatatccagcagatatgttagaagtgtataaagattatttaccagacgtttacaaagagggagatttacaaacgattcagcaaccgatcgactttttcggatttaactattattcaacagcaacattaaaagattggaaaaaaggtgaccgtgaaccgatcgtatttgaacatgtgagcacaggaagacctgtgacggatatgaattgggaagtgaatccaaacggtttgtttgatttaatggtgcgattgaaaaaagattatggcgatattccattatacattaccgaaaacggtgctgcatacaaagatcgcgtcaacgaacaaggtgaagtagaagatgatgagcgagttgcttatatacgagagcatttaatcgcttgccaccgcgcgattgaacaaggcgtcaatttaaaaggatattatgtatggtcgctgttcgataattttgagtgggcatttggatatgataagcgctttgggattgtatacgtggattatgaaacgctagagcgcatcccgaaaaagagtgcattatggtataaggaaacgattataaacaacggattgaaagacgaaaaagataaaagatctcatcaccatcaccatcactaa

SEQ ID NO: 7 - DNA, 1386 bp, Artificial Sequence
  Derived by Lab Evolution
atgcttcagtttccgaaagattttatttggggagctgcaacttcatcgtatcaaattgaaggaacagcgactggagaagataaaatttactcgatctgggatcacttttcccgcattcctggcaaaatagcgaatggggataatggcgatattgcaattgatcattacaatcgttatgttgaagacatcgcattaatgaaatttcttcatttgaaagcgtatcgattttcgactagttgggcgagactttattgtgaaacgccagggaagtttaacgaaaaaggtttagatttttataagcgtcttgtaaatgagctgctagagaacggtatcgagccaatgttgaccatttatcattgggatatgccacaagctcttcaagagaaaggtggctgggaaaatcgtgatatcgttcaatacttccaagaatacgctgctttcctttacgagaatcttggggatgtcgtgaaaaaatggattacgcataatgagccgtgggttgtcacctatttaggatatgggaatggcgaacatgccccagggattcaaaactttacatcatttttaaaagcagcacatcatgttcttctctcacacggggaagcggtaaaagcgtttcgagcaatcggtccgaaagatggggaaattggtattacgttgaatttgacacctggatatgcggttgatccgaaagatgaaaaagcagttgatgccgctcgaaaatgggacggctttatgaatcgttggtttttagatcctgtatttaagggacaatatccagcagatatgttagaagtgtataaagattatttaccagacgtttacaaagagggagatttacaaacgattcagcaaccgatcgactttttcggatttaactattattcaacagcaacattaaaagattggaaaaaaggtgaccgtgaaccgatcgtatttgaacatgtgagcacaggaagacctgtgacggatatgaattgggaagtgaatccaaacggtttgtttgatttaatggtgcgattgaaaaaagattatggcgatattccattatacattaccgaaaacggtgctgcatacaaagatcgcgtcaacgaacaaggtgaagtagaagatgatgagcgagttgcttatatacgagagcatttaatcgcttgccaccgcgcgattgaacaaggcgtcaatttaaaaggatattatgtatggtcgctgttcgataattttgagtgggcatttggatatgataagcgctttgggattgtatacgtggattatgaaacgctagagcgcatcccgaaaaagagtgcattatggtataaggaaacgattataaacaacggattgaaagcagaaaaagataaaagatctcatcaccatcaccatcactaa

SEQ ID NO: 8 - DNA, 1386 bp, Artificial Sequence
  Derived by Lab Evolution
atgcttcagtttccgaaagattttatttggggagctgcaacttcatcgtatcaaattgaaggaacagcgactggagaagataaaatttactcgatctgggatcacttttcccgcattcctggcaaaatagcgaatggggataatggcgatattgcaattgatcattacaatcgttatgttgaagacatcgcattaatgaaatggcttcatttgaaagcgtatcgattttcgactagttgggcgagactttattgtgaaacgccagggaagtttaacgaaaaaggtttagatttttataagcgtcttgtaaatgagctgctagagaacggtatcgagccaatgttgaccatttatcattgggatatgccacaagctcttcaagagaaaggtggctgggaaaatcgtgatatcgttcaatacttccaagaatacgctgctttcctttacgagaatcttggggatgtcgtgaaaaaatggattacgcataatgagccgtgggttgtcacctatttaggatatgggaatggcgaacatgccccagggattcaaaactttacatcatttttaaaagcagcacatcatgttcttctctcacacggggaagcggtaaaagcgtttcgagcaatcggtccgaaagatggggaaattggtattacgttgaatttgacacctggatatgcggttgatccgaaagatgaaaaagcagttgatgccgctcgaaaatgggacggctttatgaatcgttggtttttagatcctgtatttaagggacaatatccagcagatatgttagaagtgtataaagattatttaccagacgtttacaaagagggagatttacaaacgattcagcaaccgatcgactttttcggatttaactattattcaacagcaacattaaaagattggaaaaaaggtgaccgtgaaccgatcgtatttgaacatgtgagcacaggaagacctgtgacggatatgaattgggaagtgaatccaaacggtttgtttgatttaatggtgcgattgaaaaaagattatggcgatattccattatacattaccgaaaacggtgctgcatacaaagatcgcgtcaacgaacaaggtgaagtagaagatgatgagcgagttgcttatatacgagagcatttaatcgcttgccaccgcgcgattgaacaaggcgtcaatttaaaaggatattatgtatggtcgctgttcgataattttgagtgggcatttggatatgataagcgctttgggattgtatacgtggattatgaaacgctagagcgcatcccgaaaaagagtgcattatggtataaggaaacgattataaacaacggattgaaagcagaaaaagataaaagatctcatcaccatcaccatcactaa

SEQ ID NO: 9 - DNA, 1386 bp, Artificial Sequence
  Derived by Lab Evolution
atgcttcagtttccgaaagattttatttggggagctgcaacttcatcgtatcaaattgaaggaacagcgactggagaagataaaatttactcgatctgggatcacttttcccgcattcctggcaaaatagcgaatggggataatggcgatattgcaattgatcattacaatcgttatgttgaagacatcgcattaatgaaagcgcttcatttgaaagggtatcgattttcgactagttgggcgagactttattgtgaaacgccagggaagtttaacgaaaaaggtttagatttttataagcgtcttgtaaatgagctgctagagaacggtatcgagccaatgttgaccatttatcattgggatatgccacaagctcttcaagagaaaggtggctgggaaaatcgtgatatcgttcaatacttccaagaatacgctgctttcctttacgagaatcttggggatgtcgtgaaaaaatggattacgcataatgagccgtgggttgtcacctatttaggatatgggaatggcgaacatgccccagggattcaaaactttacatcatttttaaaagcagcacatcatgttcttctctcacacggggaagcggtaaaagcgtttcgagcaatcggtccgaaagatggggaaattggtattacgttgaatttgacacctggatatgcggttgatccgaaagatgaaaaagcagttgatgccgctcgaaaatgggacggctttatgaatcgttggtttttagatcctgtatttaagggacaatatccagcagatatgttagaagtgtataaagattatttaccagacgtttacaaagagggagatttacaaacgattcagcaaccgatcgactttttcggatttaactattattcaacagcaacattaaaagattggaaaaaaggtgaccgtgaaccgatcgtatttgaacatgtgagcacaggaagacctgtgacggatatgaattgggaagtgaatccaaacggtttgtttgatttaatggtgcgattgaaaaaagattatggcgatattccattatacattaccgaaaacggtgctgcatacaaagatcgcgtcaacgaacaaggtgaagtagaagatgatgagcgagttgcttatatacgagagcatttaatcgcttgccaccgcgcgattgaacaaggcgtcaatttaaaaggatattatgtatggtcgctgttcgataattttgagtgggcatttggatatgataagcgctttgggattgtatacgtggattatgaaacgctagagcgcatcccgaaaaagagtgcattatggtataaggaaacgattataaacaacggattgaaagcagaaaaagataaaagatctcatcaccatcaccatcactaa

SEQ ID NO: 10 - DNA, 1386 bp, Artificial Sequence
  Derived by Lab Evolution
atgcttcagtttccgaaagattttatttggggagctgcaacttcatcgtatcaaattgaaggaacagcgactggagaagataaaatttactcgatctgggatcacttttcccgcattcctggcaaaatagcgaatggggataatggcgatattgcaattgatcattacaatcgttatgttgaagacatcgcattaatgaaagcgcttcatttgaaaagttatcgattttcgactagttgggcgagactttattgtgaaacgccagggaagtttaacgaaaaaggtttagatttttataagcgtcttgtaaatgagctgctagagaacggtatcgagccaatgttgaccatttatcattgggatatgccacaagctcttcaagagaaaggtggctgggaaaatcgtgatatcgttcaatacttccaagaatacgctgctttcctttacgagaatcttggggatgtcgtgaaaaaatggattacgcataatgagccgtgggttgtcacctatttaggatatgggaatggcgaacatgccccagggattcaaaactttacatcatttttaaaagcagcacatcatgttcttctctcacacggggaagcggtaaaagcgtttcgagcaatcggtccgaaagatggggaaattggtattacgttgaatttgacacctggatatgcggttgatccgaaagatgaaaaagcagttgatgccgctcgaaaatgggacggctttatgaatcgttggtttttagatcctgtatttaagggacaatatccagcagatatgttagaagtgtataaagattatttaccagacgtttacaaagagggagatttacaaacgattcagcaaccgatcgactttttcggatttaactattattcaacagcaacattaaaagattggaaaaaaggtgaccgtgaaccgatcgtatttgaacatgtgagcacaggaagacctgtgacggatatgaattgggaagtgaatccaaacggtttgtttgatttaatggtgcgattgaaaaaagattatggcgatattccattatacattaccgaaaacggtgctgcatacaaagatcgcgtcaacgaacaaggtgaagtagaagatgatgagcgagttgcttatatacgagagcatttaatcgcttgccaccgcgcgattgaacaaggcgtcaatttaaaaggatattatgtatggtcgctgttcgataattttgagtgggcatttggatatgataagcgctttgggattgtatacgtggattatgaaacgctagagcgcatcccgaaaaagagtgcattatggtataaggaaacgattataaacaacggattgaaagcagaaaaagataaaagatctcatcaccatcaccatcactaa

SEQ ID NO: 11 - DNA, 1386 bp, Artificial Sequence
  Derived by Lab Evolution
atgcttcagtttccgaaagattttatttggggagctgcaacttcatcgtatcaaattgaaggaacagcgactggagaagataaaatttactcgatctgggatcacttttcccgcattcctggcaaaatagcgaatggggataatggcgatattgcaattgatcattacaatcgttatgttgaagacatcgcattaatgaaagcgcttcatttgaaatcttatcgattttcgactagttgggcgagactttattgtgaaacgccagggaagtttaacgaaaaaggtttagatttttataagcgtcttgtaaatgagctgctagagaacggtatcgagccaatgttgaccatttatcattgggatatgccacaagctcttcaagagaaaggtggctgggaaaatcgtgatatcgttcaatacttccaagaatacgctgctttcctttacgagaatcttggggatgtcgtgaaaaaatggattacgcataatgagccgtgggttgtcacctatttaggatatgggaatggcgaacatgccccagggattcaaaactttacatcatttttaaaagcagcacatcatgttcttctctcacacggggaagcggtaaaagcgtttcgagcaatcggtccgaaagatggggaaattggtattacgttgaatttgacacctggatatgcggttgatccgaaagatgaaaaagcagttgatgccgctcgaaaatgggacggctttatgaatcgttggtttttagatcctgtatttaagggacaatatccagcagatatgttagaagtgtataaagattatttaccagacgtttacaaagagggagatttacaaacgattcagcaaccgatcgactttttcggatttaactattattcaacagcaacattaaaagattggaaaaaaggtgaccgtgaaccgatcgtatttgaacatgtgagcacaggaagacctgtgacggatatgaattgggaagtgaatccaaacggtttgtttgatttaatggtgcgattgaaaaaagattatggcgatattccattatacattaccgaaaacggtgctgcatacaaagatcgcgtcaacgaacaaggtgaagtagaagatgatgagcgagttgcttatatacgagagcatttaatcgcttgccaccgcgcgattgaacaaggcgtcaatttaaaaggatattatgtatggtcgctgttcgataattttgagtgggcatttggatatgataagcgctttgggattgtatacgtggattatgaaacgctagagcgcatcccgaaaaagagtgcattatggtataaggaaacgattataaacaacggattgaaagcagaaaaagataaaagatctcatcaccatcaccatcactaa

SEQ ID NO: 12 - DNA, 1386 bp, Artificial Sequence
  Derived by Lab Evolution
atgcttcagtttccgaaagattttatttggggagctgcaacttcatcgtatcaaattgaaggaacagcgactggagaagataaaatttactcgatctgggatcacttttcccgcattcctggcaaaatagcgaatggggataatggcgatattgcaattgatcattacaatcgttatgttgaagacatcgcattaatgaaagcgcttcatttgaaatcgtatcgattttcgactagttgggcgagactttattgtgaaacgccagggaagtttaacgaaaaaggtttagatttttataagcgtcttgtaaatgagctgctagagaacggtatcgagccaatgttgaccatttatcattgggatatgccacaagctcttcaagagaaaggtggctgggaaaatcgtgatatcgttcaatacttccaagaatacgctgctttcctttacgagaatcttggggatgtcgtgaaaaaatggattacgcataatgagccgtgggttgtcacctatttaggatatgggaatggcgaacatgccccagggattcaaaactttacatcatttttaaaagcagcacatcatgttcttctctcacacggggaagcggtaaaagcgtttcgagcaatcggtccgaaagatggggaaattggtattacgttgaatttgacacctggatatgcggttgatccgaaagatgaaaaagcagttgatgccgctcgaaaatgggacggctttatgaatcgttggtttttagatcctgtatttaagggacaatatccagcagatatgttagaagtgtataaagattatttaccagacgtttacaaagagggagatttacaaacgattcagcaaccgatcgactttttcggatttaactattattcaacagcaacattaaaagattggaaaaaaggtgaccgtgaaccgatcgtatttgaacatgtgagcacaggaagacctgtgacggatatgaattgggaagtgaatccaaacggtttgtttgatttaatggtgcgattgaaaaaagattatggcgatattccattatacattaccgaaaacggtgctgcatacaaagatcgcgtcaacgaacaaggtgaagtagaagatgatgagcgagttgcttatatacgagagcatttaatcgcttgccaccgcgcgattgaacaaggcgtcaatttaaaaggatattatgtatggtcgctgttcgataattttgagtgggcatttggatatgataagcgctttgggattgtatacgtggattatgaaacgctagagcgcatcccgaaaaagagtgcattatggtataaggaaacgattataaacaacggattgaaagcagaaaaagataaaagatctcatcaccatcaccatcactaa

SEQ ID NO: 13 - DNA, 1386 bp, Artificial Sequence
  Derived by Lab Evolution
atgcttcagtttccgaaagattttatttggggagctgcaacttcatcgtatcaaattgaaggaacagcgactggagaagataaaatttactcgatctgggatcacttttcccgcattcctggcaaaatagcgaatggggataatggcgatattgcaattgatcattacaatcgttatgttgaagacatcgcattaatgaaagcgcttcatttgaaagcgtatcgattttcgactagttgggcgagactttattgtgaaacgccagggaagtttaacgaaaaaggtttagatttttataagcgtcttgtaaatgagctgctagagaacggtatcgagccaatgttgaccatttatcattgggatatgccacaagctcttcaagagaaaggtggctgggaaaatcgtgatatcgttcaatacttccaagaatacgctgctttcctttacgagaatcttggggatgtcgtgaaaaaatggattacgcataatgagccgtgggttgtcacctatttaggatatgggaatggcgaacatgccccagggattcaaaactttacatcatttttaaaagcagcacatcatgttcttctctcacacggggaagcggtaaaagcgtttcgagcaatcggtccgaaagatggggaaattggtattacgttgaatttgacacctggatatgcggttgatccgaaagatgaaaaagcagttgatgccgctcgaaaatgggacggctttatgaatcgttggtttttagatcctgtatttaagggacaatatccagcagatatgttagaagtgtataaagattatttaccagacgtttacaaagagggagatttacaaacgattcagcaaccgatcgactttttcggatttaactattattcaacagcaacattaaaatcttggaaaaaaggtgaccgtgaaccgatcgtatttgaacatgtgagcacaggaagacctgtgacggatatgaattgggaagtgaatccaaacggtttgtttgatttaatggtgcgattgaaaaaagattatggcgatattccattatacattaccgaaaacggtgctgcatacaaagatcgcgtcaacgaacaaggtgaagtagaagatgatgagcgagttgcttatatacgagagcatttaatcgcttgccaccgcgcgattgaacaaggcgtcaatttaaaaggatattatgtatggtcgctgttcgataattttgagtgggcatttggatatgataagcgctttgggattgtatacgtggattatgaaacgctagagcgcatcccgaaaaagagtgcattatggtataaggaaacgattataaacaacggattgaaagcagaaaaagataaaagatctcatcaccatcaccatcactaa

SEQ ID NO: 14 - DNA, 1386 bp, Artificial Sequence
  Derived by Lab Evolution
atgcttcagtttccgaaagattttatttggggagctgcaacttcatcgtatcaaattgaaggaacagcgactggagaagataaaatttactcgatctgggatcacttttcccgcattcctggcaaaatagcgaatggggataatggcgatattgcaattgatcattacaatcgttatgttgaagacatcgcattaatgaaagcgcttcatttgaaagcgtatcgattttcgactagttgggcgagactttattgtgaaacgccagggaagtttaacgaaaaaggtttagatttttataagcgtcttgtaaatgagctgctagagaacggtatcgagccaatgttgaccatttatcattgggatatgccacaagctcttcaagagaaaggtggctgggaaaatcgtgatatcgttcaatacttccaagaatacgctgctttcctttacgagaatcttggggatgtcgtgaaaaaatggattacgcataatgagccgtgggttgtcacctatttaggatatgggaatggcgaacatgccccagggattcaaaactttacatcatttttaaaagcagcacatcatgttcttctctcacacggggaagcggtaaaagcgtttcgagcaatcggtccgaaagatggggaaattggtattacgttgaatttgacacctggatatgcggttgatccgaaagatgaaaaagcagttgatgccgctcgaaaatgggacggctttatgaatcgttggtttttagatcctgtatttaagggacaatatccagcagatatgttagaagtgtataaagattatttaccagacgtttacaaagagggagatttacaaacgattcagcaaccgatcgactttttcggatttaactattattcaacagcaacattaaaagattggaaaaaaggtgaccgtgaaccgatcgtatttgaacatgtgagcacaggaagacctgtgacggatatgaattgggaagtgaatccaaacggtttgtttgatttaatggtgcgattgaaaaaagattatggcgatattccattatacattaccgaaaacggtgctgcatacaaagatcgcgtcaacgaacaaggtgaagtagaagatgatgagcgagttgcttatatacgagagcatttaatcgcttgccaccgcgcgattgaacaaggcgtcaatttaaaaggatattatgtatggtcgctgttcgataattttgagtgggcatttggatattcgaagcgctttgggattgtatacgtggattatgaaacgctagagcgcatcccgaaaaagagtgcattatggtataaggaaacgattataaacaacggattgaaagcagaaaaagataaaagatctcatcaccatcaccatcactaa

SEQ ID NO: 15 - DNA, 1386 bp, Artificial Sequence
  Derived by Lab Evolution
atgcttcagtttccgaaagattttatttggggagctgcaacttcatcgtatcaaattgaaggaacagcgactggagaagataaaatttactcgatctgggatcacttttcccgcattcctggcaaaatagcgaatggggataatggcgatattgcaattgatcattacaatcgttatgttgaagacatcgcattaatgaaagcgcttcatttgaaagcgtatcgattttcgactagttgggcgagactttattgtgaaacgccagggaagtttaacgaaaaaggtttagatttttataagcgtcttgtaaatgagctgctagagaacggtatcgagccaatgttgaccatttatcattgggatatgccacaagctcttcaagagaaaggtggctgggaaaatcgtgatatcgttcaatacttccaagaatacgctgctttcctttacgagaatcttggggatgtcgtgaaaaaatggattacgcataatgagccgtgggttgtcacctatttaggatatgggaatggcgaacatgccccagggattcaaaactttacatcatttttaaaagcagcacatcatgttcttctctcacacggggaagcggtaaaagcgtttcgagcaatcggtccgaaagatggggaaattggtattacgttgaatttgacacctggatatgcggttgatccgaaagatgaaaaagcagttgatgccgctcgaaaatgggacggctttatgaatcgttggtttttagatcctgtatttaagggacaatatccagcagatatgttagaagtgtataaagattatttaccagacgtttacaaagagggagatttacaaacgattcagcaaccgatcgactttttcggatttaactattattcaacagcaacattaaaagattggaaaaaaggtgaccgtgaaccgatcgtatttgaacatgtgagcacaggaagacctgtgacggatatgaattgggaagtgaatccaaacggtttgtttgatttaatggtgcgattgaaaaaagattatggcgatattccattatacattaccgaaaacggtgctgcatacaaagatcgcgtcaacgaacaaggtgaagtagaagatgatgagcgagttgcttatatacgagagcatttaatcgcttgccaccgcgcgattgaacaaggcgtcaatttaaaaggatattatgtatggtcgctgttcgataattttgagtgggcatttggatatacgaagcgctttgggattgtatacgtggattatgaaacgctagagcgcatcccgaaaaagagtgcattatggtataaggaaacgattataaacaacggattgaaagcagaaaaagataaaagatctcatcaccatcaccatcactaa

SEQ ID NO: 16 - DNA, 1386 bp, Artificial Sequence
  Derived by Lab Evolution
atgcttcagtttccgaaagattttatttggggagctgcaacttcatcgtatcaaattgaaggaacagcgactggagaagataaaatttactcgatctgggatcacttttcccgcattcctggcaaaatagcgaatggggataatggcgatattgcaattgatcattacaatcgttatgttgaagacatcgcattaatgaaagcgcttcatttgaaagcgtatcgattttcgactagttgggcgagactttattgtgaaacgccagggaagtttaacgaaaaaggtttagatttttataagcgtcttgtaaatgagctgctagagaacggtatcgagccaatgttgaccatttatcattgggatatgccacaagctcttcaagagaaaggtggctgggaaaatcgtgatatcgttcaatacttccaagaatacgctgctttcctttacgagaatcttggggatgtcgtgaaaaaatggattacgcataatgagccgtgggttgtcacctatttaggatatgggaatggcgaacatgccccagggattcaaaactttacatcatttttaaaagcagcacatcatgttcttctctcacacggggaagcggtaaaagcgtttcgagcaatcggtccgaaagatggggaaattggtattacgttgaatttgacacctggatatgcggttgatccgaaagatgaaaaagcagttgatgccgctcgaaaatgggacggctttatgaatcgttggtttttagatcctgtatttaagggacaatatccagcagatatgttagaagtgtataaagattatttaccagacgtttacaaagagggagatttacaaacgattcagcaaccgatcgactttttcggatttaactattattcaacagcaacattaaaagattggaaaaaaggtgaccgtgaaccgatcgtatttgaacatgtgagcacaggaagacctgtgacggatatgaattgggaagtgaatccaaacggtttgtttgatttaatggtgcgattgaaaaaagattatggcgatattccattatacattaccgaaaacggtgctgcatacaaagatcgcgtcaacgaacaaggtgaagtagaagatgatgagcgagttgcttatatacgagagcatttaatcgcttgccaccgcgcgattgaacaaggcgtcaatttaaaaggatattatgtatggtcgctgttcgataattttgagtgggcatttggatatactaagcgctttgggattgtatacgtggattatgaaacgctagagcgcatcccgaaaaagagtgcattatggtataaggaaacgattataaacaacggattgaaagcagaaaaagataaaagatctcatcaccatcaccatcactaa

SEQ ID NO: 17 - DNA, 1386 bp, Artificial Sequence
  Derived by Lab Evolution
atgcttcagtttccgaaaggttttatttggggagctgcaacttcatcgtatcaaattgaaggaacagcgactggagaagataaaatttactcgatctgggatcacttttcccgcattcctggcaaaatagcgaatggggataatggcgatattgcaattgatcattacaatcgttatgttgaagacatcgcattaatgaaagcgcttcatttgaaagcgtatcgattttcgactagttgggcgagactttattgtgaaacgccagggaagtttaacgaaaaaggtttagatttttataagcgtcttgtaaatgagctgctagagaacggtatcgagccaatgttgaccatttatcattgggatatgccacaagctcttcaagagaaaggtggctgggaaaatcgtgatatcgttcaatacttccaagaatacgctgctttcctttacgagaatcttggggatgtcgtgaaaaaatggattacgcataatgagccgtgggttgtcacctatttaggatatgggaatggcgaacatgccccagggattcaaaactttacatcatttttaaaagcagcacatcatgttcttctctcacacggggaagcggtaaaagcgtttcgagcaatcggtccgaaagatggggaaattggtattacgttgaatttgacacctggatatgcggttgatccgaaagatgaaaaagcagttgatgccgctcgaaaatgggacggctttatgaatcgttggtttttagatcctgtatttaagggacaatatccagcagatatgttagaagtgtataaagattatttaccagacgtttacaaagagggagatttacaaacgattcagcaaccgatcgactttttcggatttaactattattcaacagcaacattaaaagattggaaaaaaggtgaccgtgaaccgatcgtatttgaacatgtgagcacaggaagacctgtgacggatatgaattgggaagtgaatccaaacggtttgtttgatttaatggtgcgattgaaaaaagattatggcgatattccattatacattaccgaaaacggtgctgcatacaaagatcgcgtcaacgaacaaggtgaagtagaagatgatgagcgagttgcttatatacgagagcatttaatcgcttgccaccgcgcgattgaacaaggcgtcaatttaaaaggatattatgtatggtcgctgttcgataattttgagtgggcatttggatatgataagcgctttgggattgtatacgtggattatgaaacgctagagcgcatcccgaaaaagagtgcattatggtataaggaaacgattataaacaacggattgaaagcagaaaaagataaaagatctcatcaccatcaccatcactaa

SEQ ID NO: 18 - DNA, 1386 bp, Artificial Sequence
  Derived by Lab Evolution
atgcttcagtttccgaaagggtttatttggggagctgcaacttcatcgtatcaaattgaaggaacagcgactggagaagataaaatttactcgatctgggatcacttttcccgcattcctggcaaaatagcgaatggggataatggcgatattgcaattgatcattacaatcgttatgttgaagacatcgcattaatgaaagcgcttcatttgaaagcgtatcgattttcgactagttgggcgagactttattgtgaaacgccagggaagtttaacgaaaaaggtttagatttttataagcgtcttgtaaatgagctgctagagaacggtatcgagccaatgttgaccatttatcattgggatatgccacaagctcttcaagagaaaggtggctgggaaaatcgtgatatcgttcaatacttccaagaatacgctgctttcctttacgagaatcttggggatgtcgtgaaaaaatggattacgcataatgagccgtgggttgtcacctatttaggatatgggaatggcgaacatgccccagggattcaaaactttacatcatttttaaaagcagcacatcatgttcttctctcacacggggaagcggtaaaagcgtttcgagcaatcggtccgaaagatggggaaattggtattacgttgaatttgacacctggatatgcggttgatccgaaagatgaaaaagcagttgatgccgctcgaaaatgggacggctttatgaatcgttggtttttagatcctgtatttaagggacaatatccagcagatatgttagaagtgtataaagattatttaccagacgtttacaaagagggagatttacaaacgattcagcaaccgatcgactttttcggatttaactattattcaacagcaacattaaaagattggaaaaaaggtgaccgtgaaccgatcgtatttgaacatgtgagcacaggaagacctgtgacggatatgaattgggaagtgaatccaaacggtttgtttgatttaatggtgcgattgaaaaaagattatggcgatattccattatacattaccgaaaacggtgctgcatacaaagatcgcgtcaacgaacaaggtgaagtagaagatgatgagcgagttgcttatatacgagagcatttaatcgcttgccaccgcgcgattgaacaaggcgtcaatttaaaaggatattatgtatggtcgctgttcgataattttgagtgggcatttggatatgataagcgctttgggattgtatacgtggattatgaaacgctagagcgcatcccgaaaaagagtgcattatggtataaggaaacgattataaacaacggattgaaagcagaaaaagataaaagatctcatcaccatcaccatcactaa

SEQ ID NO: 19 - DNA, 1386 bp, Artificial Sequence
  Derived by Lab Evolution
atgcttcagtttccgaaacattttatttggggagctgcaacttcatcgtatcaaattgaaggaacagcgactggagaagataaaatttactcgatctgggatcacttttcccgcattcctggcaaaatagcgaatggggataatggcgatattgcaattgatcattacaatcgttatgttgaagacatcgcattaatgaaagcgcttcatttgaaagcgtatcgattttcgactagttgggcgagactttattgtgaaacgccagggaagtttaacgaaaaaggtttagatttttataagcgtcttgtaaatgagctgctagagaacggtatcgagccaatgttgaccatttatcattgggatatgccacaagctcttcaagagaaaggtggctgggaaaatcgtgatatcgttcaatacttccaagaatacgctgctttcctttacgagaatcttggggatgtcgtgaaaaaatggattacgcataatgagccgtgggttgtcacctatttaggatatgggaatggcgaacatgccccagggattcaaaactttacatcatttttaaaagcagcacatcatgttcttctctcacacggggaagcggtaaaagcgtttcgagcaatcggtccgaaagatggggaaattggtattacgttgaatttgacacctggatatgcggttgatccgaaagatgaaaaagcagttgatgccgctcgaaaatgggacggctttatgaatcgttggtttttagatcctgtatttaagggacaatatccagcagatatgttagaagtgtataaagattatttaccagacgtttacaaagagggagatttacaaacgattcagcaaccgatcgactttttcggatttaactattattcaacagcaacattaaaagattggaaaaaaggtgaccgtgaaccgatcgtatttgaacatgtgagcacaggaagacctgtgacggatatgaattgggaagtgaatccaaacggtttgtttgatttaatggtgcgattgaaaaaagattatggcgatattccattatacattaccgaaaacggtgctgcatacaaagatcgcgtcaacgaacaaggtgaagtagaagatgatgagcgagttgcttatatacgagagcatttaatcgcttgccaccgcgcgattgaacaaggcgtcaatttaaaaggatattatgtatggtcgctgttcgataattttgagtgggcatttggatatgataagcgctttgggattgtatacgtggattatgaaacgctagagcgcatcccgaaaaagagtgcattatggtataaggaaacgattataaacaacggattgaaagcagaaaaagataaaagatctcatcaccatcaccatcactaa

SEQ ID NO: 20 - DNA, 1386 bp, Artificial Sequence
  Derived by Lab Evolution
atgcttcagtttccgaaagattttatttggggagctgcaacttcatcgtatcaaattgaaggaacagcgactggagaagataaaatttactcgatctgggatcacttttcccgcattcctggcaaaatagcgaatggggataatggcgatattgcaattgatcattacaatcgttatgttgaagacatcgcattaatgaaagcgcttcatttgaaagcgtatcgattttcgactagttgggcgagactttattgtgaaacgccagggaagtttaacgaaaaaggtttagatttttataagcgtcttgtaaatgggctgctagagaacggtatcgagccaatgttgaccatttatcattgggatatgccacaagctcttcaagagaaaggtggctgggaaaatcgtgatatcgttcaatacttccaagaatacgctgctttcctttacgagaatcttggggatgtcgtgaaaaaatggattacgcataatgagccgtgggttgtcacctatttaggatatgggaatggcgaacatgccccagggattcaaaactttacatcatttttaaaagcagcacatcatgttcttctctcacacggggaagcggtaaaagcgtttcgagcaatcggtccgaaagatggggaaattggtattacgttgaatttgacacctggatatgcggttgatccgaaagatgaaaaagcagttgatgccgctcgaaaatgggacggctttatgaatcgttggtttttagatcctgtatttaagggacaatatccagcagatatgttagaagtgtataaagattatttaccagacgtttacaaagagggagatttacaaacgattcagcaaccgatcgactttttcggatttaactattattcaacagcaacattaaaagattggaaaaaaggtgaccgtgaaccgatcgtatttgaacatgtgagcacaggaagacctgtgacggatatgaattgggaagtgaatccaaacggtttgtttgatttaatggtgcgattgaaaaaagattatggcgatattccattatacattaccgaaaacggtgctgcatacaaagatcgcgtcaacgaacaaggtgaagtagaagatgatgagcgagttgcttatatacgagagcatttaatcgcttgccaccgcgcgattgaacaaggcgtcaatttaaaaggatattatgtatggtcgctgttcgataattttgagtgggcatttggatatgataagcgctttgggattgtatacgtggattatgaaacgctagagcgcatcccgaaaaagagtgcattatggtataaggaaacgattataaacaacggattgaaagcagaaaaagataaaagatctcatcaccatcaccatcactaa

SEQ ID NO: 21 - DNA, 1386 bp, Artificial Sequence
  Derived by Lab Evolution
atgcttcagtttccgaaagattttatttggggagctgcaacttcatcgtatcaaattgaaggaacagcgactggagaagataaaatttactcgatctgggatcacttttcccgcattcctggcaaaatagcgaatggggataatggcgatattgcaattgatcattacaatcgttatgttgaagacatcgcattaatgaaagcgcttcatttgaaagcgtatcgattttcgactagttgggcgagactttattgtgaaacgccagggaagtttaacgaaaaaggtttagatttttataagcgtcttgtaaatgagctgctagagaacggtatcgagccaatgttgaccatttatcattgggatatgccacaagctcttcaagagaaaggtggctgggaaaatcgtgatatcgttcaatacttccaagaatacgctgctttcctttacgagaatcttggggatgtcgtgaaaaaatggattacgcataatgagccgtgggttgtcacctatttaggatatgggaatggcgaacatgccccagggattcaaaactttacatcatttttaaaagcagcacatcatgttcttctctcacacggggaagcggtaaaagcgtttcgagcaatcggtccgaaagatggggaaattggtattacgttgaatttgacacctggatatgcggttgatccgaaagatgaaaaagcagttgatgccgctcgaaaatgggacggctttatgaatcgttggtttttagatcctgtatttaagggacaatatccagcagatatgttagaagtgtataaagattatttaccagacgtttacaaagagggagatttacaaacgattcagcaaccgatcgactttttcggatttaactattattcaacagcaacattaaaagattggaaaaaaggtgaccgtgaaccgatcgtatttgaacatgtgagcacaggaagacctgtgacggatatgaattgggaagtgaatccaaacggtttgtttgatttaatggtgcgattgaaaaaagattatggcgatattccattatacattaccgaaaacggtgctgcatacaaagatcgcgtcaacgaacaaggtgaagtagaagatgatgagcgagttgcttatatacgagagcatttaatcgcttgccaccgcgcgattgaacaaggcgtcaatttaaaaggatattatgtatggtcgctgttcgataattttgagtgggcatttggatatgataagcgctttgggattgtatacgtggattatgaaacgctagatcgcatcccgaaaaagagtgcattatggtataaggaaacgattataaacaacggattgaaagcagaaaaagataaaagatctcatcaccatcaccatcactaa

SEQ ID NO: 22 - DNA, 1386 bp, Artificial Sequence
  Derived by Lab Evolution
atgcttcagtttccgaaagattttatttggggagctgcaacttcatcgtatcaaattgaaggaacagcgactggagaagataaaatttactcgatctgggatcacttttcccgcattcctggcaaaatagcgaatggggataatggcgatattgcaattgatcattacaatcgttatgttgaagacatcgcattaatgaaagcgcttcatttgaaagcgtatcgattttcgactagttgggcgagactttattgtgaaacgccagggaagtttaacgaaaaaggtttagatttttataagcgtcttgtaaatgagctgctagagaacggtatcgagccaatgttgaccatttatcattgggatatgccacaagctcttcaagagaaaggtggctgggaaaatcgtgatatcgttcaatacttccaagaatacgctgctttcctttacgagaatcttggggatgtcgtgaaaaaatggattacgcataatgagccgtgggttgtcacctatttaggatatgggaatggcgaacatgccccagggattcaaaactttacatcatttttaaaagcagcacatcatgttcttctctcacacggggaagcggtaaaagcgtttcgagcaatcggtccgaaagatggggaaattggtattacgttgaatttgacacctggatatgcggttgatccgaaagatgaaaaagcagttgatgccgctcgaaaatgggacggctttatgaatcgttggtttttagatcctgtatttaagggacaatatccagcagatatgttagaagtgtataaagattatttaccagacgtttacaaagagggagatttacaaacgattcagcaaccgatcgactttttcggatttaactattattcaacagcaacattaaaagattggaaaaaaggtgaccgtgaaccgatcgtatttgaacatgtgagcacaggaagacctgtgacggatatgaattgggaagtgaatccaaacggtttgtttgatttaatggtgcgattgaaaaaagattatggcgatattccattatacattaccgaaaacggtgctgcatacaaagatcgcgtcaacgaacaaggtgaagtagaagatgatgagcgagttgcttatatacgagagcatttaatcgcttgccaccgcgcgattgaacaaggcgtcaatttaaaaggatattatgtatggtcgctgttcgataattttgagtgggcatttggatatgataagcgctttgggattgtatacgtggattatgaaacgctaattcgcatcccgaaaaagagtgcattatggtataaggaaacgattataaacaacggattgaaagcagaaaaagataaaagatctcatcaccatcaccatcactaa

SEQ ID NO: 23 - DNA, 1386 bp, Artificial Sequence
  Derived by Lab Evolution
atgcttcagtttccgaaagattttatttggggagctgcaacttcatcgtatcaaattgaaggaacagcgactggagaagataaaatttactcgatctgggatcacttttcccgcattcctggcaaaatagcgaatggggataatggcgatattgcaattgatcattacaatcgttatgttgaagacatcgcattaatgaaagcgcttcatttgaaagcgtatcgattttcgactagttgggcgagactttattgtgaaacgccagggaagtttaacgaaaaaggtttagatttttataagcgtcttgtaaatgagctgctagagaacggtatcgagccaatgttgaccatttatcattgggatatgccacaagctcttcaagagaaaggtggctgggaaaatcgtgatatcgttcaatacttccaagaatacgctgctttcctttacgagaatcttggggatgtcgtgaaaaaatggattacgcataatgagccgtgggttgtcacctatttaggatatgggaatggcgaacatgccccagggattcaaaactttacatcatttttaaaagcagcacatcatgttcttctctcacacggggaagcggtaaaagcgtttcgagcaatcggtccgaaagatggggaaattggtattacgttgaatttgacacctggatatgcggttgatccgaaagatgaaaaagcagttgatgccgctcgaaaatgggacggctttatgaatcgttggtttttagatcctgtatttaagggacaatatccagcagatatgttagaagtgtataaagattatttaccagacgtttacaaagagggagatttacaaacgattcagcaaccgatcgactttttcggatttaactattattcaacagcaacattaaaagattggaaaaaaggtgaccgtgaaccgatcgtatttgaacatgtgagcacaggaagacctgtgacggatatgaattgggaagtgaatccaaacggtttgtttgatttaatggtgcgattgaaaaaagattatggcgatattccattatacattaccgaaaacggtgctgcatacaaagatcgcgtcaacgaacaaggtgaagtagaagatgatgagcgagttgcttatatacgagagcatttaatcgcttgccaccgcgcgattgaacaaggcgtcaatttaaaaggatattatgtatggtcgctgttcgataattttgagtgggcatttggatatgataagcgctttgggattgtatacgtggattatgaaacgctagagcgcatcccgaaaaagagtgcattatggtataaggaaacgattataaacaacggattgaaagcatgtaaagataaaagatctcatcaccatcaccatcactaa

SEQ ID NO: 24 - DNA, 1386 bp, Artificial Sequence
  Derived by Lab Evolution
atgcttcagtttccgaaagattttatttggggagctgcaacttcatcgtatcaaattgaaggaacagcgactggagaagataaaatttactcgatctgggatcacttttcccgcattcctggcaaaatagcgaatggggataatggcgatattgcaattgatcattacaatcgttatgttgaagacatcgcattaatgaaagcgcttcatttgaaagcgtatcgattttcgactagttgggcgagactttattgtgaaacgccagggaagtttaacgaaaaaggtttagatttttataagcgtcttgtaaatgagctgctagagaacggtatcgagccaatgttgaccatttatcattgggatatgccacaagctcttcaagagaaaggtggctgggaaaatcgtgatatcgttcaatacttccaagaatacgctgctttcctttacgagaatcttggggatgtcgtgaaaaaatggattacgcataatgagccgtgggttgtcacctatttaggatatgggaatggcgaacatgccccagggattcaaaactttacatcatttttaaaagcagcacatcatgttcttctctcacacggggaagcggtaaaagcgtttcgagcaatcggtccgaaagatggggaaattggtattacgttgaatttgacacctggatatgcggttgatccgaaagatgaaaaagcagttgatgccgctcgaaaatgggacggctttatgaatcgttggtttttagatcctgtatttaagggacaatatccagcagatatgttagaagtgtataaagattatttaccagacgtttacaaagagggagatttacaaacgattcagcaaccgatcgactttttcggaattaactattattcaacagcaacattaaaagattggaaaaaaggtgaccgtgaaccgatcgtatttgaacatgtgagcacaggaagacctgtgacggatatgaattgggaagtgaatccaaacggtttgtttgatttaatggtgcgattgaaaaaagattatggcgatattccattatacattaccgaaaacggtgctgcatacaaagatcgcgtcaacgaacaaggtgaagtagaagatgatgagcgagttgcttatatacgagagcatttaatcgcttgccaccgcgcgattgaacaaggcgtcaatttaaaaggatattatgtatggtcgctgttcgataattttgagtgggcatttggatatgataagcgctttgggattgtatacgtggattatgaaacgctagagcgcatcccgaaaaagagtgcattatggtataaggaaacgattataaacaacggattgaaagcagaaaaagataaaagatctcatcaccatcaccatcactaa

SEQ ID NO: 25 - DNA, 1386 bp, Artificial Sequence
  Derived by Lab Evolution
atgcttcagtttccgaaagattttatttggggagctgcaacttcatcgtatcaaattgaaggaacagcgactggagaagataaaatttactcgatctgggatcacttttcccgcattcctggcaaaatagcgaatggggataatggcgatattgcaattgatcattacaatcgttatgttgaagacatcgcattaatgaaagcgcttcatttgaaagcgtatcgattttcgactagttgggcgagactttattgtgaaacgccagggaagtttaacgaaaaaggtttagatttttataagcgtcttgtaaatgagctgctagagaacggtatcgagccaatgttgaccatttatcattgggatatgccacaagctcttcaagagaaaggtggctgggaaaatcgtgatatcgttcaatacttccaagaatacgctgctttcctttacgagaatcttggggatgtcgtgaaaaaatggattacgcataatgagccgtgggttgtcacctatttaggatatgggaatggcgaacatgccccagggattcaaaactttacatcatttttaaaagcagcacatcatgttcttctctcacacggggaagcggtaaaagcgtttcgagcaatcggtccgaaagatggggaaattggtattacgttgaatttgacacctggatatgcggttgatccgaaagatgaaaaagcagttgatgccgctcgaaaatgggacggctttatgaatcgttggtttttagatcctgtatttaagggacaatatccagcagatatgttagaagtgtataaagattatttaccagacgtttacaaagagggagatttacaaacgattcagcaaccgatcgactttttcggagttaactattattcaacagcaacattaaaagattggaaaaaaggtgaccgtgaaccgatcgtatttgaacatgtgagcacaggaagacctgtgacggatatgaattgggaagtgaatccaaacggtttgtttgatttaatggtgcgattgaaaaaagattatggcgatattccattatacattaccgaaaacggtgctgcatacaaagatcgcgtcaacgaacaaggtgaagtagaagatgatgagcgagttgcttatatacgagagcatttaatcgcttgccaccgcgcgattgaacaaggcgtcaatttaaaaggatattatgtatggtcgctgttcgataattttgagtgggcatttggatatgataagcgctttgggattgtatacgtggattatgaaacgctagagcgcatcccgaaaaagagtgcattatggtataaggaaacgattataaacaacggattgaaagcagaaaaagataaaagatctcatcaccatcaccatcactaa

SEQ ID NO: 26 - DNA, 1386 bp, Artificial Sequence
  Derived by Lab Evolution
atgcttcagtttccgaaagattttatttggggagctgcaacttcatcgtatcaaattgaaggaacagcgactggagaagataaaatttactcgatctgggatcacttttcccgcattcctggcaaaatagcgaatggggataatggcgatattgcaattgatcattacaatcgttatgttgaagacatcgcattaatgaaagcgcttcatttgaaagcgtatcgattttcgactagttgggcgagactttattgtgaaacgccagggaagtttaacgaaaaaggtttagatttttataagcgtcttgtaaatgagctgctagagaacggtatcgagccaatgttgaccatttatcattgggatatgccacaagctcttcaagagaaaggtggctgggaaaatcgtgatatcgttcaatacttccaagaatacgctgctttcctttacgagaatcttggggatgtcgtgaaaaaatggattacgcataatgagccgtgggttgtcacctatttaggatatgggaatggcgaacatgccccagggattcaaaactttacatcatttttaaaagcagcacatcatgttcttctctcacacggggaagcggtaaaagcgtttcgagcaatcggtccgaaagatggggaaattggaattgcgttgaatttgacacctggatatgcggttgatccgaaagatgaaaaagcagttgatgccgctcgaaaatgggacggctttatgaatcgttggtttttagatcctgtatttaagggacaatatccagcagatatgttagaagtgtataaagattatttaccagacgtttacaaagagggagatttacaaacgattcagcaaccgatcgactttttcggatttaactattattcaacagcaacattaaaagattggaaaaaaggtgaccgtgaaccgatcgtatttgaacatgtgagcacaggaagacctgtgacggatatgaattgggaagtgaatccaaacggtttgtttgatttaatggtgcgattgaaaaaagattatggcgatattccattatacattaccgaaaacggtgctgcatacaaagatcgcgtcaacgaacaaggtgaagtagaagatgatgagcgagttgcttatatacgagagcatttaatcgcttgccaccgcgcgattgaacaaggcgtcaatttaaaaggatattatgtatggtcgctgttcgataattttgagtgggcatttggatatgataagcgctttgggattgtatacgtggattatgaaacgctagagcgcatcccgaaaaagagtgcattatggtataaggaaacgattataaacaacggattgaaagcagaaaaagataaaagatctcatcaccatcaccatcactaa

SEQ ID NO: 27 - DNA, 1386 bp, Artificial Sequence
  Derived by Lab Evolution
atgcttcagtttccgaaagattttatttggggagctgcaacttcatcgtatcaaattgaaggaacagcgactggagaagataaaatttactcgatctgggatcacttttcccgcattcctggcaaaatagcgaatggggataatggcgatattgcaattgatcattacaatcgttatgttgaagacatcgcattaatgaaagcgcttcatttgaaagcgtatcgattttcgactagttgggcgagactttattgtgaaacgccagggaagtttaacgaaaaaggtttagatttttataagcgtcttgtaaatgagctgctagagaacggtatcgagccaatgttgaccatttatcattgggatatgccacaagctcttcaagagaaaggtggctgggaaaatcgtgatatcgttcaatacttccaagaatacgctgctttcctttacgagaatcttggggatgtcgtgaaaaaatggattacgcataatgagccgtgggttgtcacctatttaggatatgggaatggcgaacatgccccagggattcaaaactttacatcatttttaaaagcagcacatcatgttcttctctcacatggggaagcggtaaaagcgtttcgagcaatcggtccgaaagatggggaaattggtattacgttgaatttgacacctggatatgcggttgatccgaaagatgaaaaagcagttgatgccgctcgaaaatgggacggctttatgaatcgttggtttttagatcctgtatttaagggacaatatccagcagatatgttagaagtgtataaagattatttaccagacgtttacaaagagggagatttacaaacgattcagcaaccgatcgactttttcggatttaactattattcaacagcaacattaaaagattggaaaaaaggtgaccgtgaaccgatcgtatttgaacatgtgagcacaggaagacctgtgacggatatgaattgggaagtgaatccaaacggtttgtttgatttaatggtgcgattgaaaaaagattatggcgatattccattatacattaccgaaaacggtgctgcatacaaagatcgcgtcaacgaacaaggtgaagtagaagatgatgagcgagttgcttatatacgagagcatttaatcgcttgccaccgcgcgattgaacaaggcgtcaatttaaaaggatattatgtatggtcgctgttcgataattttgagtgggcatttggatatgataagcgctttgggattgtatacgtggattatgaaacgctagagcgcatcccgaaaaagagtgcattatggtataaggaaacgattataaacaacggattgaaagaggaaaaagataaaagatctcatcaccatcaccatcactaa

SEQ ID NO: 28 - DNA, 1386 bp, Artificial Sequence
  Derived by Lab Evolution
atgcttcagtttccgaaagattttatttggggagctgcaacttcatcgtatcaaattgaaggaacagcgactggagaagataaaatttactcgatctgggatcacttttcccgcattcctggcaaaatagcgaatggggataatggcgatattgcaattgatcattacaatcgttatgttgaagacatcgcattaatgaaagcgcttcatttgaaagcgtatcgattttcgactagttgggcgagactttattgtgaaacgccagggaagtttaacgaaaaaggtttagatttttataagcgtcttgtaaatgagctgctagagaacggtatcgagccaatgttgaccatttatcattgggatatgccacaagctcttcaagagaaaggtggctgggaaaatcgtgatatcgttcaatacttccaagaatacgctgctttcctttacgagaatcttggggatgtcgtgaaaaaatggattacgcataatgagccgtgggttgtcacctatttaggatatgggaatggcgaacatgccccagggattcaaaactttacatcatttttaaaagcagcacatcatgttcttctctcacacggggaagcggtaaaagcgtttcgagcaatcggtccgaaagatggggaaattggtattacgttgaatttgacacctggatatgcggttgatccgaaagatgaaaaagcagttgatgccgctcgaaaatgggacggctttatgaatcgttggtttttagatcctgtatttaagggacaatatccagcagatatgttagaagtgtataaagattatttaccagacgtttacaaagagggagatttacaaacgattcagcaaccgatcgactttttcggatttaactattattcaacagcaacattaaaagattggaaaaaaggtgaccgtgaaccgatcgtatttgaatttgtgagcacaggaagacctgtgacggatatgaattgggaagtgaatccaaacggtttgtttgatttaatggtgcgattgaaaaaagattatggcgatattccattatacattaccgaaaacggtgctgcatacaaagatcgcgtcaacgaacaaggtgaagtagaagatgatgagcgagttgcttatatacgagagcatttaatcgcttgccaccgcgcgattgaacaaggcgtcaatttaaaaggatattatgtatggtcgctgttcgataattttgagtgggcatttggatatgataagcgctttgggattgtatacgtggattatgaaacgctagagcgcatcccgaaaaagagtgcattatggtataaggaaacgattataaacaacggattgaaagcagaaaaagataaaagatctcatcaccatcaccatcactaa

SEQ ID NO: 29 - DNA, 1386 bp, Artificial Sequence
  Derived by Lab Evolution
atgcttcagtttccgaaagattttatttggggagctgcaacttcatcgtatcaaattgaaggaacagcgactggagaagataaaatttactcgatctgggatcacttttcccgcattcctggcaaaatagcgaatggggataatggcgatattgcaattgatcattacaatcgttatgttgaagacatcgcattaatgaaagcgcttcatttgaaagcgtatcgattttcgactagttgggcgagactttattgtgaaacgccagggaagtttaacgaaaaaggtttagatttttataagcgtcttgtaaatgagctgctagagaacggtatcgagccaatgttgaccatttatcattgggatatgccacaagctcttcaagagaaaggtggctgggaaaatcgtgatatcgttcaatacttccaagaatacgctgctttcctttacgagaatcttggggatgtcgtgaaaaaatggattacgcataatgagccgtgggttgtcacctatttaggatatgggaatggcgaacatgccccagggattcaaaactttacatcatttttaaaagcagcacatcatgttcttctctcacacggggaagcggtaaaagcgtttcgagcaatcggtccgaaagatggggaaattggtattacgttgaatttgacacctggatatgcggttgatccgaaagatgaaaaagcagttgatgccgctcgaaaatgggacggctttatgaatcgttggtttttagatcctgtatttaagggacaatatccagcagatatgttagaagtgtataaagattatttaccagacgtttacaaagagggagatttacaaacgattcagcaaccgatcgactttttcggatttaactattattcaacagcaacattaaaagattggaaaaaaggtgaccgtgaaccgatcgtatttgaaattgtgagcacaggaagacctgtgacggatatgaattgggaagtgaatccaaacggtttgtttgatttaatggtgcgattgaaaaaagattatggcgatattccattatacattaccgaaaacggtgctgcatacaaagatcgcgtcaacgaacaaggtgaagtagaagatgatgagcgagttgcttatatacgagagcatttaatcgcttgccaccgcgcgattgaacaaggcgtcaatttaaaaggatattatgtatggtcgctgttcgataattttgagtgggcatttggatatgataagcgctttgggattgtatacgtggattatgaaacgctagagcgcatcccgaaaaagagtgcattatggtataaggaaacgattataaacaacggattgaaagcagaaaaagataaaagatctcatcaccatcaccatcactaa

SEQ ID NO: 30 - DNA, 1386 bp, Artificial Sequence
  Derived by Lab Evolution
atgcttcagtttccgaaagattttatttggggagctgcaacttcatcgtatcaaattgaaggaacagcgactggagaagataaaatttactcgatctgggatcacttttcccgcattcctggcaaaatagcgaatggggataatggcgatattgcaattgatcattacaatcgttatgttgaagacatcgcattaatgaaagcgcttcatttgaaagcgtatcgattttcgactagttgggcgagactttattgtgaaacgccagggaagtttaacgaaaaaggtttagatttttataagcgtcttgtaaatgagctgctagagaacggtatcgagccaatgttgaccatttatcattgggatatgccacaagctcttcaagagaaaggtggctgggaaaatcgtgatatcgttcaatacttccaagaatacgctgctttcctttacgagaatcttggggatgtcgtgaaaaaatggattacgcataatgagccgtgggttgtcacctatttaggatatgggaatggcgaacatgccccagggattcaaaactttacatcatttttaaaagcagcacatcatgttcttctctcacacggggaagcggtaaaagcgtttcgagcaatcggtccgaaagatggggaaattggtattacgttgaatttgacacctggatatgcggttgatccgaaagatgaaaaagcagttgatgccgctcgaaaatgggacggctttatgaatcgttggtttttagatcctgtatttaagggacaatatccagcagatatgttagaagtgtataaagattatttaccagacgtttacaaagagggagatttacaaacgattcagcaaccgatcgactttttcggatttaactattattcaacagcaacattaaaagattggaaaaaaggtgaccgtgaaccgatcgtatttgaaaaggtgagcacaggaagacctgtgacggatatgaattgggaagtgaatccaaacggtttgtttgatttaatggtgcgattgaaaaaagattatggcgatattccattatacattaccgaaaacggtgctgcatacaaagatcgcgtcaacgaacaaggtgaagtagaagatgatgagcgagttgcttatatacgagagcatttaatcgcttgccaccgcgcgattgaacaaggcgtcaatttaaaaggatattatgtatggtcgctgttcgataattttgagtgggcatttggatatgataagcgctttgggattgtatacgtggattatgaaacgctagagcgcatcccgaaaaagagtgcattatggtataaggaaacgattataaacaacggattgaaagcagaaaaagataaaagatctcatcaccatcaccatcactaa

SEQ ID NO: 31 - DNA, 1386 bp, Artificial Sequence
  Derived by Lab Evolution
atgcttcagtttccgaaagattttatttggggagctgcaacttcatcgtatcaaattgaaggaacagcgactggagaagataaaatttactcgatctgggatcacttttcccgcattcctggcaaaatagcgaatggggataatggcgatattgcaattgatcattacaatcgttatgttgaagacatcgcattaatgaaagcgcttcatttgaaagcgtatcgattttcgactagttgggcgagactttattgtgaaacgccagggaagtttaacgaaaaaggtttagatttttataagcgtcttgtaaatgagctgctagagaacggtatcgagccaatgttgaccatttatcattgggatatgccacaagctcttcaagagaaaggtggctgggaaaatcgtgatatcgttcaatacttccaagaatacgctgctttcctttacgagaatcttggggatgtcgtgaaaaaatggattacgcataatgagccgtgggttgtcacctatttaggatatgggaatggcgaacatgccccagggattcaaaactttacatcatttttaaaagcagcacatcatgttcttctctcacacggggaagcggtaaaagcgtttcgagcaatcggtccgaaagatggggaagttggtattgcgttgaatttgacacctggatatgcggttgatccgaaagatgaaaaagcagttgatgccgctcgaaaatgggacggctttaagaatcgttggtttttagatcctgtatttaagggacaatatccagcagatatgttagaagtgtataaagattatttaccagacgtttacaaagagggagatttacaaacgattcagcaaccgatcgactttttcggatttaactattattcaacagcaacattaaaagattggaaaaaaggtgaccgtgaaccgatcgtatttgaacatgtgagcacaggaagacctgtgacggatatgaattgggaagtgaatccaaacggtttgtttgatttaatggtgcgattgaaaaaagattatggcgatattccattatacattaccgaaaacggtgctgcatacaaagatcgcgtcaacgaacaaggtgaagtagaagatgatgagcgagttgcttatatacgagagcatttaatcgcttgccaccgcgcgattgaacaaggcgtcaatttaaaaggatattatgtatggtcgctgttcgataattttgagtgggcatttggatatgataagcgctttgggattgtatacgtggattatgaaacgctagagcgcatcccgaaaaagagtgcattatggtataaggaaacgattataaacaacggattgaaagcagaaaaagataaaagatctcatcaccatcaccatcactaa

SEQ ID NO: 32 - DNA, 1386 bp, Artificial Sequence
  Derived by Lab Evolution
atgcttcagtttccgaaagattttatttggggagctgcaacttcatcgtatcaaattgaaggaacagcgactggagaagataaaatttactcgatctgggatcacttttcccgcattcctggcaaaatagcgaatggggataatggcgatattgcaattgatcattacaatcgttatgttgaagacatcgcattaatgaaagcgcttcatttgaaagcgtatcgattttcgactagttgggcgagactttattgtgaaacgccagggaagtttaacgaaaaaggtttagatttttataagcgtcttgtaaatgagctgctagagaacggtatcgagccaatgttgaccatttatcattgggatatgccacaagctcttcaagagaaaggtggctgggaaaatcgtgatatcgttcaatacttccaagaatacgctgctttcctttacgagaatcttggggatgtcgtgaaaaaatggattacgcataatgagccgtgggttgtcacctatttaggatatgggaatggcgaacatgccccagggattcaaaactttacatcatttttaaaagcagcacatcatgttcttctctcacacggggaagcggtaaaagcgtttcgagcaatcggtccgaaagatggggaaattggtattacgttgaatttgacacctggatatgcggttgatccgaaagatgaaaaagcagttgatgccgctcgaaaatgggacggctttatgaatcgttggtttttagatcctgtatttaagggacaatatccagcagatatgttagaagtgtataaagattatttaccagacgtttacaaagagggagatttacaaacgattcagcaaccgatcgactttttcggatttaactattattcaacagcaacattaaaagattggaaaaaaggtgaccgtgaaccgatcgtatttgaacatgtgagcacaggaagacctgtgacggatatgaattgggaagtgaatccaaacggtttgtttgatttaatggtgcgattgaaaaaagattatggcgatattccattatacattaccgaaaacggtgctgcatacaaagatcgcgtcaacgaacaaggtgaagtagaagatgatgagcgagttgcttatttgcgagagcatttaatcgcttgccaccgcgcgattgaacaaggcgtcaatttaaaaggatattatgtatggtcgctgttcgataattttgagtgggcatttggatatgataagcgctttgggattgtatacgtggattatgaaacgctagagcgcatcccgaaaaagagtgcattatggtataaggaaacgattataaacaacggattgaaagcagaaaaagataaaagatctcatcaccatcaccatcactaa

SEQ ID NO: 33 - DNA, 1386 bp, Artificial Sequence
  Derived by Lab Evolution
atgcttcagtttccgaaagattttatttggggagctgcaacttcatcgtatcaaattgaaggaacagcgactggagaagataaaatttactcgatctgggatcacttttcccgcattcctggcaaaatagcgaatggggataatggcgatattgcaattgatcattacaatcgttatgttgaagacgtggcattaatgaaagcgcttcatttgaaagcgtatcgattttcgactagttgggcgagactttattgtgaaacgccagggaagtttaacgaaaaaggtttagatttttataagcgtcttgtaaatgagctgctagagaacggtatcgagccaatgttgaccatttatcattgggatatgccacaagctcttcaagagaaaggtggctgggaaaatcgtgatatcgttcaatacttccaagaatacgctgctttcctttacgagaatcttggggatgtcgtgaaaaaatggattacgcataatgagccgtgggttgtcacctatttaggatatgggaatggcgaacatgccccagggattcaaaactttacatcatttttaaaagcagcacatcatgttcttctctcacacggggaagcggtaaaagcgtttcgagcaatcggtccgaaagatggggaaattggtattacgttgaatttgacacctggatatgcggttgatccgaaagatgaaaaagcagttgatgccgctcgaaaatgggacggctttatgaatcgttggtttttagatcctgtatttaagggacaatatccagcagatatgttagaagtgtataaagattatttaccagacgtttacaaagagggagatttacaaacgattcagcaaccgatcgactttttcggatttaactattattcaacagcaacattaaaagattggaaaaaaggtgaccgtgaaccgatcgtatttgaacatgtgagcacaggaagacctgtgacggatatgaattgggaagtgaatccaaacggtttgtttgatttaatggtgcgattgaaaaaagattatggcgatattccattatacattaccgaaaacggtgctgcatacaaagatcgcgtcaacgaacaaggtgaagtagaagatgatgagcgagttgcttatatacgagagcatttaatcgcttgccaccgcgcgattgaacaaggcgtcaatttaaaaggatattatgtatggtcgctgttcgataattttgagtgggcatttggatatgataagcgctttgggattgtatacgtggattatgaaacgctagagcgcatcccgaaaaagagtgcattatggtataaggaaacgattataaacaacggattgaaagcagaaaaagataaaagatctcatcaccatcaccatcactaa

SEQ ID NO: 34 - DNA, 1386 bp, Artificial Sequence
  Derived by Lab Evolution
atgcttcagtttccgaaagattttatttggggagctgcaacttcatcgtatcaaattgaaggaacagcgactggagaagataaaatttactcgatctgggatcacttttcccgcattcctggcaaaatagcgaatggggataatggcgatattgcaattgatcattacaatcgttatgttgaagacgttgcattaatgaaagcgcttcatttgaaagcgtatcgattttcgactagttgggcgagactttattgtgaaacgccagggaagtttaacgaaaaaggtttagatttttataagcgtcttgtaaatgagctgctagagaacggtatcgagccaatgttgaccatttatcattgggatatgccacaagctcttcaagagaaaggtggctgggaaaatcgtgatatcgttcaatacttccaagaatacgctgctttcctttacgagaatcttggggatgtcgtgaaaaaatggattacgcataatgagccgtgggttgtcacctatttaggatatgggaatggcgaacatgccccagggattcaaaactttacatcatttttaaaagcagcacatcatgttcttctctcacacggggaagcggtaaaagcgtttcgagcaatcggtccgaaagatggggaaattggtattacgttgaatttgacacctggatatgcggttgatccgaaagatgaaaaagcagttgatgccgctcgaaaatgggacggctttatgaatcgttggtttttagatcctgtatttaagggacaatatccagcagatatgttagaagtgtataaagattatttaccagacgtttacaaagagggagatttacaaacgattcagcaaccgatcgactttttcggatttaactattattcaacagcaacattaaaagattggaaaaaaggtgaccgtgaaccgatcgtatttgaacatgtgagcacaggaagacctgtgacggatatgaattgggaagtgaatccaaacggtttgtttgatttaatggtgcgattgaaaaaagattatggcgatattccattatacattaccgaaaacggtgctgcatacaaagatcgcgtcaacgaacaaggtgaagtagaagatgatgagcgagttgcttatatacgagagcatttaatcgcttgccaccgcgcgattgaacaaggcgtcaatttaaaaggatattatgtatggtcgctgttcgataattttgagtgggcatttggatatgataagcgctttgggattgtatacgtggattatgaaacgctagagcgcatcccgaaaaagagtgcattatggtataaggaaacgattataaacaacggattgaaagcagaaaaagataaaagatctcatcaccatcaccatcactaa

SEQ ID NO: 35 - DNA, 1386 bp, Artificial Sequence
  Derived by Lab Evolution
atgcttcagtttccgaaagattttatttggggagctgcaacttcatcgtatcaaattgaaggaacagcgactggagaagataaaatttactcgatctgggatcacttttcccgcattcctggcaaaatagcgaatggggataatggcgatattgcaattgatcattacaatcgttatgttgaagacatcgcattaatgaaagcgcttcatttgaaagcgtatcgattttcgactagttgggcgagactttattgtgaaacgccagggaagtttaacgaaaaaggtttagatttttataagcgtcttgtaaatgagctgctagagaacggtatcgagccaatgttgaccatttatcattgggatatgccacaagctcttcaagagaaaggtggctgggaaaatcgtgatatcgttcaatacttccaagaatacgctgctttcctttacgagaatcttggggatgtcgtgaaaaaatggattacgcataatgagccgtgggttgtcacctatttaggatatgggaatggcgaacatgccccagggattcaaaactttacatcatttttaaaagcagcacatcatgttcttctctcacacggggaagcggtaaaagcgtttcgagcaatcggtccgaaagatggggaaattggtattacgttgaatttgacacctggatatgcggttgatccgaaagatgaaaaagcagttgatgccgctcgaaaatgggacggctttatgaatcgttggtttttagatcctgtatttaagggacaatatccagcagatatgttagaagtgtataaagattatttaccagacgtttacaaagagggagatttacaaacgattcagcaaccgatcgactttttcggatttaactattattcaacagcaacattaaaagattggaaaaaaggtgaccgtgaaccgatcgtatttgaacatgtgagcacaggaagacctgtgacggatatgaattgggaagtgaatccaaacggtttgtttgatttaatggtgcgattgaaaaaagattatggcgatattccattatacattaccgaaaacggtgctgcatacaaagatcgcgtcaacgaacaaggtgaagtagaagatgatgagcgagttgcttatatacgagagcatttaatcgcttgccaccgcgcgattgaacaaggcgtcaatttaaaaggatattatgtatggtcgctgttcgataattttgagtgggcatttggatatgatgctcgctttgggattgtatacgtggattatgaaacgctagagcgcatcccgaaaaagagtgcattatggtataaggaaacgattataaacaacggattgaaagcagaaaaagataaaagatctcatcaccatcaccatcactaa

SEQ ID NO: 36 - DNA, 1386 bp, Artificial Sequence
  Derived by Lab Evolution
atgcttcagtttccgaaagattttatttggggagctgcaacttcatcgtatcaaattgaaggaacagcgactggagaagataaaatttactcgatctgggatcacttttcccgcattcctggcaaaatagcgaatggggataatggcgatattgcaattgatcattacaatcgttatgttgaagacatcgcattaatgaaagcgcttcatttgaaagcgtatcgattttcgactagttgggcgagactttattgtgaaacgccagggaagtttaacgaaaaaggtttagatttttataagcgtcttgtaaatgagctgctagagaacggtatcgagccaatgttgaccatttatcattgggatatgccacaagctcttcaagagaaaggtggctgggaaaatcgtgatatcgttcaatacttccaagaatacgctgctttcctttacgagaatcttggggatgtcgtgaaaaaatggattacgcataatgagccgtgggttgtcacctatttaggatatgggaatggcgaacatgccccagggattcaaaactttacatcatttttaaaagcagcacatcatgttcttctctcacacggggaagcggtaaaagcgtttcgagcaatcggtccgaaagatggggaaattggtattacgttgaatttgacacctggatatgcggttgatccgaaagatgaaaaagcagttgatgccgctcgaaaatgggacggctttatgaatcgttggtttttagatcctgtatttaagggacaatatccagcagatatgttagaagtgtataaagattatttaccagacgtttacaaagagggagatttacaaacgattcagcaaccgatcgactttttcggatttaactattattcaacagcaacattaaaagattggaaaaaaggtgaccgtgaaccgatcgtatttgaacatgtgagcacaggaagacctgtgacggatatgaattgggaagtgaatccaaacggtttgtttgatttaatggtgcgattgaaaaaagattatggcgatattccattatacattaccgaaaacggtgctgcatacaaagatcgcgtcaacgaacaaggtgaagtagaagatgatgagcgagttgcttatatacgagagcatttaatcgcttgccaccgcgcgattgaacaaggcgtcaatttaaaaggatattatgtatggtcgctgttcgataattttgagtgggcatttggatatgataagcgctttgggattgtatacgtggattatgaaacgctagagcgcatcccgaaaaagagtgcattatggtataaggaaacgattataaacaacggattgaaagcagaagatgataaaagatctcatcaccatcaccatcactaa

SEQ ID NO: 37 - DNA, 1386 bp, Artificial Sequence
  Derived by Lab Evolution
atgcttcagtttccggtggattttatttggggagctgcaacttcatcgtatcaaattgaaggaacagcgactggagaagataaaatttactcgatctgggatcacttttcccgcattcctggcaaaatagcgaatggggataatggcgatattgcaattgatcattacaatcgttatgttgaagacatcgcattaatgaaagcgcttcatttgaaagcgtatcgattttcgactagttgggcgagactttattgtgaaacgccagggaagtttaacgaaaaaggtttagatttttataagcgtcttgtaaatgagctgctagagaacggtatcgagccaatgttgaccatttatcattgggatatgccacaagctcttcaagagaaaggtggctgggaaaatcgtgatatcgttcaatacttccaagaatacgctgctttcctttacgagaatcttggggatgtcgtgaaaaaatggattacgcataatgagccgtgggttgtcacctatttaggatatgggaatggcgaacatgccccagggattcaaaactttacatcatttttaaaagcagcacatcatgttcttctctcacacggggaagcggtaaaagcgtttcgagcaatcggtccgaaagatggggaaattggtattacgttgaatttgacacctggatatgcggttgatccgaaagatgaaaaagcagttgatgccgctcgaaaatgggacggctttatgaatcgttggtttttagatcctgtatttaagggacaatatccagcagatatgttagaagtgtataaagattatttaccagacgtttacaaagagggagatttacaaacgattcagcaaccgatcgactttttcggatttaactattattcaacagcaacattaaaagattggaaaaaaggtgaccgtgaaccgatcgtatttgaacatgtgagcacaggaagacctgtgacggatatgaattgggaagtgaatccaaacggtttgtttgatttaatggtgcgattgaaaaaagattatggcgatattccattatacattaccgaaaacggtgctgcatacaaagatcgcgtcaacgaacaaggtgaagtagaagatgatgagcgagttgcttatatacgagagcatttaatcgcttgccaccgcgcgattgaacaaggcgtcaatttaaaaggatattatgtatggtcgctgttcgataattttgagtgggcatttggatatgataagcgctttgggattgtatacgtggattatgaaacgctagagcgcatcccgaaaaagagtgcattatggtataaggaaacgattataaacaacggattgaaagcagaaaaagataaaagatctcatcaccatcaccatcactaa

SEQ ID NO: 38 - DNA, 1386 bp, Artificial Sequence
  Derived by Lab Evolution
atgcttcagtttccgaaagattttatttggggagctgcaacttcatcgtatcaaattgaaggaacagcgactggagaagataaaatttactcgatctgggatcacttttcccgcattcctggcaaaatagcgaatggggataatggcgatattgcaattgatcattacaatcgttatgttgaagacatcgcattaatgaaagcgcttcatttgaaagcgtatcgattttcgactagttgggcgagactttattgtgaaacgccagggaagtttaacgaaaaaggtttagatttttataagcgtcttgtaaatgagctgctagagaacggtatcgagccaatgttgaccatttatcattgggatatgccacaagctcttcaagagaaaggtggctgggaaaatcgtgatatcgttcaatacttccaagaatacgctgctttcctttacgagaatcttggggatgtcgtgaaaaaatggattacgcataatgagccgtgggttgtcacctatttaggatatgggaatggcgaacatgccccagggattcaaaactttacatcatttttaaaagcagcacatcatgttcttctctcacacggggaagcggtaaaagcgtttcgagcaatcggtccgaaagatggggaaattggtattacgttgaatttgacacctggatatgcggttgatccgaaagatgaaaaagcagttgatgccgctcgaaaatgggacggctttatgaatcgttggtttttagatcctgtatttaagggacaatatccagcagatatgttagaagtgtataaagattatttaccagacgtttacaaagagggagatttacaaacgattcagcaaccgatcgactttttcggatttaactattattcaacagcaacattaaaagattggaaaaaaggtgaccgtgaaccgatcgtatttgaacatgtgagcacaggaagacctgtgacggatatgaattgggaagtgaatccaaacggtttgtttgatttaatggtgcgattgaaaaaagattatggcgatattccattatacattaccgaaaacggtgctgcatacaaagatcgcgtcaacgaacaaggtgaagtagaagatgatgagcgagttgcttatatacgagagcatttaatcgcttgccaccgcgcgattgaacaaggcgtcaatttaaaaggatattatgtatggtcgctgttcgataattttgagtgggcatttggatatgataagcgctttgggattgtatacgtggattatgaaacgggggagcgcatcccgaaaaagagtgcattatggtataaggaaacgattataaacaacggattgaaagcagaaaaagataaaagatctcatcaccatcaccatcactaa

SEQ ID NO: 39 - DNA, 1386 bp, Artificial Sequence
  Derived by Lab Evolution
atgcttcagtttccgaaagattttatttggggagctgcaacttcatcgtatcaaattgaaggaacagcgactggagaagataaaatttactcgatctgggatcacttttcccgcattcctggcaaaatagcgaatggggataatggcgatattgcaattgatcattacaatcgttatgttgaagacatcgcattaatgaaagcgcttcatttgaaagcgtatcgattttcgactagttgggcgagactttattgtgaaacgccagggaagtttaacgaaaaaggtttagatttttataagcgtcttgtaaatgagctgctagagaacggtatcgagccaatgttgaccatttatcattgggatatgccacaagctcttcaagagaaaggtggctgggaaaatcgtgatatcgttcaatacttccaagaatacgctgctttcctttacgagaatcttggggatgtcgtgaaaaaatggattacgcataatgagccgtgggttgtcacctatttaggatatgggaatggcgaacatgccccagggattcaaaactttacatcatttttaaaagcagcacatcatgttcttctctcacacggggaagcggtaaaagcgtttcgagcaatcggtccgaaagatggggaaattggtattacgttgaatttgacacctggatatgcggttgatccgaaagatgaaaaagcagttgatgccgctcgaaaatgggacggctttatgaatcgttggtttttagatcctgtatttaagggacaatatccagcagatatgttagaagtgtataaagattatttaccagacgtttacaaagagggagatttacaaacgattcagcaaccgatcgactttttcggatttaactattattcaacagcaacattaaaagattggaaaaaaggtgaccgtgaaccgatcgtatttgaacatgtgagcacaggaagacctgtgacggatatgaattgggaagtgaatccaaacggtttgtttgatttaatggtgcgattgaaaaaagattatggcgatattccattatacattaccgaaaacggtgctgcatacaaagatcgcgtcaacgaacaaggtgaagtagaagatgatgagcgagttgcttatatacgagagcatttaatcgcttgccaccgcgcgattgaacaaggcgtcaatttaaaaggatattatgtatggtcgctgttcgataattttgagtgggcatttggatatgataagcgctttgggattgtatacgtggattatgaaacgggtgagcgcatcccgaaaaagagtgcattatggtataaggaaacgattataaacaacggattgaaagcagaaaaagataaaagatctcatcaccatcaccatcactaa

SEQ ID NO: 40 - DNA, 1386 bp, Artificial Sequence
  Derived by Lab Evolution
atgcttcagtttccgaaagattttatttggggagctgcaacttcatcgtatcaaattgaaggaacagcgactggagaagataaaatttactcgatctgggatcacttttcccgcattcctggcaaaatagcgaatggggataatggcgatattgcaattgatcattacaatcgttatgttgaagacatcgcattaatgaaagcgcttcatttgaaagcgtatcgattttcgactagttgggcgagactttattgtgaaacgccagggaagtttaacgaaaaaggtttagatttttataagcgtcttgtaaatgagctgctagagaacggtatcgagccaatgttgaccatttatcattgggatatgccacaagctcttcaagagaaaggtggctgggaaaatcgtgatatcgttcaatacttccaagaatacgctgctttcctttacgagaatcttggggatgtcgtgaaaaaatggattacgcataatgagccgtgggttgtcacctatttaggatatgggaatggcgaacatgccccagggattcaaaactttacatcatttttaaaagcagcacatcatgttcttctctcacacggggaagcggtaaaagcgtttcgagcaatcggtccgaaagatggggaaattggtattacgttgaatttgacacctggatatgcggttgatccgaaagatgaaaaagcagttgatgccgctcgaaaatgggacggctttatgaatcgttggtttttagatcctgtatttaagggacaatatccagcagatatgttagaagtgtataaagattatttaccagacgtttacaaagagggagatttacaaacgattcagcaaccgatcgactttttcggatttaactattattcaacagcaacattaaaagattggaaaaaaggtgaccgtgaaccgatcgtatttgaacatgtgagcacaggaagacctgtgacggatatgaattgggaagtgaatccaaacggtttgtttgatttaatggtgcgattgaaaaaagattatggcgatattccattatacattaccgaaaacggtgctgcatacaaagatcgcgtcaacgaacaaggtgaagtagaagatgatgagcgagttgcttatatacgagagcatttaatcgcttgccaccgcgcgattgaacaaggcgtcaatttaaaaggatattatgtatggtcgctgttcgataattttgagtgggcatttggatatgataagcgctttgggattgtatacgtggattatgaaacgctagagcgcatcccgaaaaagagtgcattatggtataaggaaacgattataaacaacggatttaaagcagaaaaagataaaagatctcatcaccatcaccatcactaa

SEQ ID NO: 41 - DNA, 1386 bp, Artificial Sequence
  Derived by Lab Evolution
atgcttcagtttccgaaagattttatttggggagctgcaacttcatcgtatcaaattgaaggaacagcgactggagaagataaaatttactcgatctgggatcacttttcccgcattcctggcaaaatagcgaatggggataatggcgatattgcaattgatcattacaatcgttatgttgaagacatcgcattaatgaaagcgcttcatttgaaagcgtatcgattttcgactagttgggcgagactttattgtgaaacgccagggaagtttaacgaaaaaggtttagatttttataagcgtcttgtaaatgagctgctagagaacggtatcgagccaatgttgaccatttatcattgggatatgccacaagctcttcaagagaaaggtggctgggaaaatcgtgatatcgttcaatacttccaagaatacgctgctttcctttacgagaatcttggggatgtcgtgaaaaaatggattacgcataatgagccgtgggttgtcacctatttaggatatgggaatggcgaacatgccccagggattcaaaactttacatcatttttaaaagcagcacatcatgttcttctctcacacggggaagcggtaaaagcgtttcgagcaatcggtccgaaagatggggaaattggtattacgttgaatttgacacctggatatgcggttgatccgaaagatgaaaaagcagttgatgccgctcgaaaatgggacggctttcataatcgttggtttttagatcctgtatttaagggacaatatccagcagatatgttagaagtgtataaagattatttaccagacgtttacaaagagggagatttacaaacgattcagcaaccgatcgactttttcggatttaactattattcaacagcaacattaaaagattggaaaaaaggtgaccgtgaaccgatcgtatttgaacatgtgagcacaggaagacctgtgacggatatgaattgggaagtgaatccaaacggtttgtttgatttaatggtgcgattgaaaaaagattatggcgatattccattatacattaccgaaaacggtgctgcatacaaagatcgcgtcaacgaacaaggtgaagtagaagatgatgagcgagttgcttatatacgagagcatttaatcgcttgccaccgcgcgattgaacaaggcgtcaatttaaaaggatattatgtatggtcgctgttcgataattttgagtgggcatttggatatgataagcgctttgggattgtatacgtggattatgaaacgctagagcgcatcccgaaaaagagtgcattatggtataaggaaacgattataaacaacggattgaaagcagaaaaagataaaagatctcatcaccatcaccatcactaa

SEQ ID NO: 42 - DNA, 1386 bp, Artificial Sequence
  Derived by Lab Evolution
atgcttcagtttccgaaagattttatttggggagctgcaacttcatcgtatcaaattgaaggaacagcgactggagaagataaaatttactcgatctgggatcacttttcccgcattcctggcaaaatagcgaatggggataatggcgatattgcaattgatcattacaatcgttatgttgaagacatcgcattaatgaaagcgcttcatttgaaagcgtatcgattttcgactagttgggcgagactttattgtgaaacgccagggaagtttaacgaaaaaggtttagatttttataagcgtcttgtaaatgagctgctagagaacggtatcgagccaatgttgaccatttatcattgggatatgccacaagctcttcaagagaaaggtggctgggaaaatcgtgatatcgttcaatacttccaagaatacgctgctttcctttacgagaatcttggggatgtcgtgaaaaaatggattacgcataatgagccgtgggttgtcacctatttaggatatgggaatggcgaacatgccccagggattcaaaactttacatcatttttaaaagcagcacatcatgttcttctctcacacggggaagcggtaaaagcgtttcgagcaatcggtccgaaagatggggaaattggtattacgttgaatttgacacctggatatgcggttgatccgaaagatgaaaaagcagttgatgccgctcgaaaatgggacggctttaagaatcgttggtttttagatcctgtatttaagggacaatatccagcagatatgttagaagtgtataaagattatttaccagacgtttacaaagagggagatttacaaacgattcagcaaccgatcgactttttcggatttaactattattcaacagcaacattaaaagattggaaaaaaggtgaccgtgaaccgatcgtatttgaacatgtgagcacaggaagacctgtgacggatatgaattgggaagtgaatccaaacggtttgtttgatttaatggtgcgattgaaaaaagattatggcgatattccattatacattaccgaaaacggtgctgcatacaaagatcgcgtcaacgaacaaggtgaagtagaagatgatgagcgagttgcttatatacgagagcatttaatcgcttgccaccgcgcgattgaacaaggcgtcaatttaaaaggatattatgtatggtcgctgttcgataattttgagtgggcatttggatatgataagcgctttgggattgtatacgtggattatgaaacgctagagcgcatcccgaaaaagagtgcattatggtataaggaaacgattataaacaacggattgaaagcagaaaaagataaaagatctcatcaccatcaccatcactaa

SEQ ID NO: 43 - DNA, 1386 bp, Artificial Sequence
  Derived by Lab Evolution
atgcttcagtttccgaaagattttatttggggagctgcaacttcatcgtatcaaattgaaggaacagcgactggagaagataaaatttactcgatctgggatcacttttcccgcattcctggcaaaatagcgaatggggataatggcgatattgcaattgatcattacaatcgttatgttgaagacatcgcattaatgaaagcgcttcatttgaaagcgtatcgattttcgactagttgggcgagactttattgtgaaacgccagggaagtttaacgaaaaaggtttagatttttataagcgtcttgtaaatgagctgctagagaacggtatcgagccaatgttgaccatttatcattgggatatgccacaagctcttcaagagaaaggtggctgggaaaatcgtgatatcgttcaatacttccaagaatacgctgctttcctttacgagaatcttggggatgtcgtgaaaaaatggattacgcataatgagccgtgggttgtcacctatttaggatatgggaatggcgaacatgccccagggattcaaaactttacatcatttttaaaagcagcacatcatgttcttctctcacacggggaagcggtaaaagcgtttcgagcaatcggtccgaaagatggggaaattggtattacgttgaatttgacacctggatatgcggttgatccgaaagatgaaaaagcagttgatgccgctcgaaaatgggacggctttatgaatcgttggtttttagatcctgtatttaagggacaatatccagcagatatgttagaagtgtataaagattatttaccagacgtttacaaagagggagatttacaaacgattcagcaaccgatcgactttttcggatttaactattattcaacagcaacattaaaagattggaaaaaaggtgaccgtgaaccgatcgtatttgaacatgtgagcacaggaagacctgtgacggatactaattgggaagtgaatccaaacggtttgtttgatttaatggtgcgattgaaaaaagattatggcgatattccattatacattaccgaaaacggtgctgcatacaaagatcgcgtcaacgaacaaggtgaagtagaagatgatgagcgagttgcttatatacgagagcatttaatcgcttgccaccgcgcgattgaacaaggcgtcaatttaaaaggatattatgtatggtcgctgttcgataattttgagtgggcatttggatatgataagcgctttgggattgtatacgtggattatgaaacgctagagcgcatcccgaaaaagagtgcattatggtataaggaaacgattataaacaacggattgaaagcagaaaaagataaaagatctcatcaccatcaccatcactaa

SEQ ID NO: 44 - DNA, 1386 bp, Artificial Sequence
  Derived by Lab Evolution
atgcttcagtttccgaaagattttatttggggagctgcaacttcatcgtatcaaattgaaggaacagcgactggagaagataaaatttactcgatctgggatcacttttcccgcattcctggcaaaatagcgaatggggataatggcgatattgcaattgatcattacaatcgttatgttgaagacatcgcattaatgaaagcgcttcatttgaaagcgtatcgattttcgactagttgggcgagactttattgtgaaacgccagggaagtttaacgaaaaaggtttagatttttataagcgtcttgtaaatgagctgctagagaacggtatcgagccaatgttgaccatttatcattgggatatgccacaagctcttcaagagaaaggtggctgggaaaatcgtgatatcgttcaatacttccaagaatacgctgctttcctttacgagaatcttggggatgtcgtgaaaaaatggattacgcataatgagccgtgggttgtcacctatttaggatatgggaatggcgaacatgccccagggattcaaaactttacatcatttttaaaagcagcacatcatgttcttctctcacacggggaagcggtaaaagcgtttcgagcaatcggtccgaaagatggggaaattggtattacgttgaatttgacacctggatatgcggttgatccgaaagatgaaaaagcagttgatgccgctcgaaaatgggacggctttatgaatcgttggtttttagatcctgtatttaagggacaatatccagcagatatgttagaagtgtataaagattatttaccagacgtttacaaagagggagatttacaaacgattcagcaaccgatcgactttttcggatttaactattattcaacagcaacattaaaagattggaaaaaaggtgaccgtgaaccgatcgtatttgaacatgtgagcacaggaagacctgtgacggatacgaattgggaagtgaatccaaacggtttgtttgatttaatggtgcgattgaaaaaagattatggcgatattccattatacattaccgaaaacggtgctgcatacaaagatcgcgtcaacgaacaaggtgaagtagaagatgatgagcgagttgcttatatacgagagcatttaatcgcttgccaccgcgcgattgaacaaggcgtcaatttaaaaggatattatgtatggtcgctgttcgataattttgagtgggcatttggatatgataagcgctttgggattgtatacgtggattatgaaacgctagagcgcatcccgaaaaagagtgcattatggtataaggaaacgattataaacaacggattgaaagcagaaaaagataaaagatctcatcaccatcaccatcactaa

SEQ ID NO: 45 - DNA, 1386 bp, Artificial Sequence
  Derived by Lab Evolution
atgcttcagtttccgaaagattttatttggggagctgcaacttcatcgtatcaaattgaaggaacagcgactggagaagataaaatttactcgatctgggatcacttttcccgcattcctggcaaaatagcgaatggggataatggcgatattgcaattgatcattacaatcgttatgttgaagacatcgcattaatgaaagcgcttcatttgaaagcgtatcgattttcgactagttgggcgagactttattgtgaaacgccagggaagtttaacgaaaaaggtttagatttttataagcgtcttgtaaatgagctgctagagaacggtatcgagccaatgttgaccatttatcattgggatatgccacaagctcttcaagagaaaggtggctgggaaaatcgtgatatcgttcaatacttccaagaatacgctgctttcctttacgagaatcttggggatgtcgtgaaaaaatggattacgcataatgagccgtgggttgtcacctatttaggatatgggtctggcgaacatgccccagggattcaaaattttacatcatttttaaaagcagcacatcatgttcttctctcacacggggaagcggtaaaagcgtttcgagcaatcggtccgaaagatggggaaattggtattacgttgaatttgacacctggatatgcggttgatccgaaagatgaaaaagcagttgatgccgctcgaaaatgggacggctttatgaatcgttggtttttagatcctgtatttaagggacaatatccagcagatatgttagaagtgtataaagattatttaccagacgtttacaaagagggagatttacaaacgattcagcaaccgatcgactttttcggatttaactattattcaacagcaacattaaaagattggaaaaaaggtgaccgtgaaccgatcgtatttgaacatgtgagcacaggaagacctgtgacggatatgaattgggaagtgaatccaaacggtttgtttgatttaatggtgcgattgaaaaaagattatggcgatattccattatacattaccgaaaacggtgctgcatacaaagatcgcgtcaacgaacaaggtgaagtagaagatgatgagcgagttgcttatatacgagagcatttaatcgcttgccaccgcgcgattgaacaaggcgtcaatttaaaaggatattatgtatggtcgctgttcgataattttgagtgggcatttggatatgataagcgctttgggattgtatacgtggattatgaaacgctagagcgcatcccgaaaaagagtgcattatggtataaggaaacgattataaacaacggattgaaagcagaaaaagataaaagatctcatcaccatcaccatcactaa

SEQ ID NO: 46 - DNA, 1386 bp, Artificial Sequence
  Derived by Lab Evolution
atgcttcagtttccgaaagattttatttggggagctgcaacttcatcgtatcaaattgaaggaacagcgactggagaagataaaatttactcgatctgggatcacttttcccgcattcctggcaaaatagcgaatggggataatggcgatattgcaattgatcattacaatcgttatgttgaagacatcgcattaatgaaagcgcttcatttgaaagcgtatcgattttcgactagttgggcgagactttattgtgaaacgccagggaagtttaacgaaaaaggtttagatttttataagcgtcttgtaaatgagctgctagagaacggtatcgagccaatgttgaccatttatcattgggatatgccacaagctcttcaagagaaaggtggctgggaaaatcgtgatatcgttcaatacttccaagaatacgctgctttcctttacgagaatcttggggatgtcgtgaaaaaatggattacgcataatgagccgtgggttgtcacctatttaggatatgggaatggcgaacatgccccagggattcaaaactttacatcatttttaaaagcagcacatcatgttcttctctcacacggggaagcggtaaaagcgtttcgagcaatcggtccgaaagatggggaaattggtattacgttgaatttgacacctggatatgcggttgatccgaaagatgaaaaagcagttgatgccgctcgaaaatgggacggctttatgaatcgttggtttttagatcctgtatttaagggacaatatccagcagatatgttagaagtgtataaagattatttaccagacgtttacaaagagggagatttacaaacgattcagcaaccgatcgactttttcggatttaactattattcaacagcaacattaaaagattggaaaaaaggtgaccgtgaaccgatcgtatttgaacatgtgagcacaggaagacctgtgacggatatgggttgggaagtgaatccaaacggtttgtttgatttaatggtgcgattgaaaaaagattatggcgatattccattatacattaccgaaaacggtgctgcatacaaagatcgcgtcaacgaacaaggtgaagtagaagatgatgagcgagttgcttatatacgagagcatttaatcgcttgccaccgcgcgattgaacaaggcgtcaatttaaaaggatattatgtatggtcgctgttcgataattttgagtgggcatttggatatgataagcgctttgggattgtatacgtggattatgaaacgctagagcgcatcccgaaaaagagtgcattatggtataaggaaacgattataaacaacggattgaaagcagaaaaagataaaagatctcatcaccatcaccatcactaa

SEQ ID NO: 47 - DNA, 1386 bp, Artificial Sequence
  Derived by Lab Evolution
atgcttcagtttccgaaagattttatttggggagctgcaacttcatcgtatcaaattgaaggaacagcgactggagaagataaaatttactcgatctgggatcacttttcccgcattcctggcaaaatagcgaatggggataatggcgatattgcaattgatcattacaatcgttatgttgaagacatcgcattaatgaaagcgcttcatttgaaagcgtatcgattttcgactagttgggcgagactttattgtgaaacgccagggaagtttaacgaaaaaggtttagatttttataagcgtcttgtaaatgagctgctagagaacggtatcgagccaatgttgaccatttatcattgggatatgccacaagctcttcaagagaaaggtggctgggaaaatcgtgatatcgttcaatacttccaagaatacgctgctttcctttacgagaatcttggggatgtcgtgaaaaaatggattacgcataatgagccgtgggttgtcacctatttaggatatgggaatggcgaacatgccccagggattcaaaactttacatcatttttaaaagcagcacatcatgttcttctctcacacggggaagcggtaaaagcgtttcgagcaatcggtccgaaagatggggaaattggtattacgttgaatttgacacctggatatgcggttgatccgaaagatgaaaaagcagttgatgccgctcgaaaatgggacggctttatgaatcgttggtttttagatcctgtatttaagggacaatatccagcagatatgttagaagtgtataaagattatttaccagacgtttacaaagagggagatttacaaacgattcagcaaccgatcgactttttcggatttaactattattcaacagcaacattaaaagattggaaaaaaggtgaccgtgaaccgatcgtatttgaacatgtgagcacaggaagacctgtgacggatatggggtgggaagtgaatccaaacggtttgtttgatttaatggtgcgattgaaaaaagattatggcgatattccattatacattaccgaaaacggtgctgcatacaaagatcgcgtcaacgaacaaggtgaagtagaagatgatgagcgagttgcttatatacgagagcatttaatcgcttgccaccgcgcgattgaacaaggcgtcaatttaaaaggatattatgtatggtcgctgttcgataattttgagtgggcatttggatatgataagcgctttgggattgtatacgtggattatgaaacgctagagcgcatcccgaaaaagagtgcattatggtataaggaaacgattataaacaacggattgaaagcagaaaaagataaaagatctcatcaccatcaccatcactaa

SEQ ID NO: 48 - DNA, 1386 bp, Artificial Sequence
  Derived by Lab Evolution
atgcttcagtttccgaaagattttatttggggagctgcaacttcatcgtatcaaattgaaggaacagcgactggagaagataaaatttactcgatctgggatcacttttcccgcattcctggcaaaatagcgaatggggataatggcgatattgcaattgatcattacaatcgttatgttgaagacatcgcattaatgaaagcgcttcatttgaaagcgtatcgattttcgactagttgggcgagactttattgtgaaacgccagggaagtttaacgaaaaaggtttagatttttataagcgtcttgtaaatgagctgctagagaacggtatcgagccaatgttgaccatttatcattgggatatgccacaagctcttcaagagaaaggtggctgggaaaatcgtgatatcgttcaatacttccaagaatacgctgctttcctttacgagaatcttggggatgtcgtgaaaaaatggattacgcataatgagccgtgggttgtcacctatttaggatatgggaatggcgaacatgccccagggattcaaaactttacatcatttttaaaagcagcacatcatgttcttctctcacacggggaagcggtaaaagcgtttcgagcaatcggtccgaaagatggggaaattggtattacgttgaatttgacacctggatatgcggttgatccgaaagatgaaaaagcagttgatgccgctcgaaaatgggacggctttatgaatcgttggtttttagatcctgtatttaagggacaatatccagcagatatgttagaagtgtataaagattatttaccagacgtttacaaagagggagatttacaaacgattcagcaaccgatcgactttttcggatttaactattattcaacagcaacattaaaagattggaaaaaaggtgaccgtgaaccgatcgtatttgaacatgtgagcacaggaagacctgtgacggatatgaattgggaagtgaatccagagggtttgtttgatttaatggtgcgattgaaaaaagattatggcgatattccattatacattaccgaaaacggtgctgcatacaaagatcgcgtcaacgaacaaggtgaagtagaagatgatgagcgagttgcttatatacgagagcatttaatcgcttgccaccgcgcgattgaacaaggcgtcaatttaaaaggatattatgtatggtcgctgttcgataattttgagtgggcatttggatatgataagcgctttgggattgtatacgtggattatgaaacgctagagcgcatcccgaaaaagagtgcattatggtataaggaaacgattataaacaacggattgaaagcagaaaaagataaaagatctcatcaccatcaccatcactaa

SEQ ID NO: 49 - DNA, 1386 bp, Artificial Sequence
  Derived by Lab Evolution
atgcttcagtttccgaaagattttatttggggagctgcaacttcatcgtatcaaattgaaggaacagcgactggagaagataaaatttactcgatctgggatcacttttcccgcattcctggcaaaatagcgaatggggataatggcgatattgcaattgatcattacaatcgttatgttgaagacatcgcattaatgaaagcgcttcatttgaaagcgtatcgattttcgactagttgggcgagactttattgtgaaacgccagggaagtttaacgaaaaaggtttagatttttataagcgtcttgtaaatgagctgctagagaacggtatcgagccaatgttgaccatttatcattgggatatgccacaagctcttcaagagaaaggtggctgggaaaatcgtgatatcgttccttacttccaagaatacgctgctttcctttacgagaatcttggggatgtcgtgaaaaaatggattacgcataatgagccgtgggttgtcacctatttaggatatgggaatggcgaacatgccccagggattcaaaactttacatcatttttaaaagcagcacatcatgttcttctctcacacggggaagcggtaaaagcgtttcgagcaatcggtccgaaagatggggaaattggtattacgttgaatttgacacctggatatgcggttgatccgaaagatgaaaaagcagttgatgccgctcgaaaatgggacggctttatgaatcgttggtttttagatcctgtatttaagggacaatatccagcagatatgttagaagtgtataaagattatttaccagacgtttacaaagagggagatttacaaacgattcagcaaccgatcgactttttcggatttaactattattcaacagcaacattaaaagattggaaaaaaggtgaccgtgaaccgatcgtatttgaacatgtgagcacaggaagacctgtgacggatatgaattgggaagtgaatccaaacggtttgtttgatttaatggtgcgattgaaaaaagattatggcgatattccattatacattaccgaaaacggtgctgcatacaaagatcgcgtcaacgaacaaggtgaagtagaagatgatgagcgagttgcttatatacgagagcatttaatcgcttgccaccgcgcgattgaacaaggcgtcaatttaaaaggatattatgtatggtcgctgttcgataattttgagtgggcatttggatatgataagcgctttgggattgtatacgtggattatgaaacgctagagcgcatcccgaaaaagagtgcattatggtataaggaaacgattataaacaacggattgaaagcagaaaaagataaaagatctcatcaccatcaccatcactaa

SEQ ID NO: 50 - DNA, 1386 bp, Artificial Sequence
  Derived by Lab Evolution
atgcttcagtttccgaaagattttatttggggagctgcaacttcatcgtatcaaattgaaggaacagcgactggagaagataaaatttactcgatctgggatcacttttcccgcattcctggcaaaatagcgaatggggataatggcgatattgcaattgatcattacaatcgttatgttgaagacatcgcattaatgaaagcgcttcatttgaaagcgtatcgattttcgactagttgggcgagactttattgtgaaacgccagggaagtttaacgaaaaaggtttagatttttataagcgtcttgtaaatgagctgctagagaacggtatcgagccaatgttgaccatttatcattgggatatgccacaagctcttcaagagaaaggtggctgggaaaatcgtgatatcgttcaatacttcaaggaatacgctgctttcctttacgagaatcttggggatgtcgtgaaaaaatggattacgcataatgagccgtgggttgtcacctatttaggatatgggaatggcgaacatgccccagggattcaaaactttacatcatttttaaaagcagcacatcatgttcttctctcacacggggaagcggtaaaagcgtttcgagcaatcggtccgaaagatggggaaattggtattacgttgaatttgacacctggatatgcggttgatccgaaagatgaaaaagcagttgatgccgctcgaaaatgggacggctttatgaatcgttggtttttagatcctgtatttaagggacaatatccagcagatatgttagaagtgtataaagattatttaccagacgtttacaaagagggagatttacaaacgattcagcaaccgatcgactttttcggatttaactattattcaacagcaacattaaaagattggaaaaaaggtgaccgtgaaccgatcgtatttgaacatgtgagcacaggaagacctgtgacggatatgaattgggaagtgaatccaaacggtttgtttgatttaatggtgcgattgaaaaaagattatggcgatattccattatacattaccgaaaacggtgctgcatacaaagatcgcgtcaacgaacaaggtgaagtagaagatgatgagcgagttgcttatatacgagagcatttaatcgcttgccaccgcgcgattgaacaaggcgtcaatttaaaaggatattatgtatggtcgctgttcgataattttgagtgggcatttggatatgataagcgctttgggattgtatacgtggattatgaaacgctagagcgcatcccgaaaaagagtgcattatggtataaggaaacgattataaacaacggattgaaagcagaaaaagataaaagatctcatcaccatcaccatcactaa

SEQ ID NO: 51 - DNA, 1386 bp, Artificial Sequence
  Derived by Lab Evolution
atgcttcagtttccgaaagattttatttggggagctgcaacttcatcgtatcaaattgaaggaacagcgactggagaagataaaatttactcgatctgggatcacttttcccgcattcctggcaaaatagcgaatggggataatggcgatattgcaattgatcattacaatcgttatgttgaagacatcgcattaatgaaagcgcttcatttgaaagcgtatcgattttcgactagttgggcgagactttattgtgaaacgccagggaagtttaacgaaaaaggtttagatttttataagcgtcttgtaaatgagctgctagagaacggtatcgagccaatgttgaccatttatcattgggatatgccacaagctcttcaagagaaaggtggctgggaaaatcgtgatatcgttcaatacttccaagaatacgctgctttcctttacgagaatcttggggatgtcgtgaaaaaatggattacgcataatgagccgtgggttgtcacctatttaggatatgggaatggcgaacatgccccagggattcaaaactttacatcatttttaaaagcagcacatcatgttcttctctcacacggggaagcggtaaaagcgtttcgagcaatcggtccgaaagatggggaaattggtattacgttgaatttgacacctggatatgcggttgatccgaaagatgaaaaagcagttgatgccgctcgaaaatgggacggctttatgaatcgttggtttttagatcctgtatttaagggacaatatccagcagatatgttagaagtgtataaagattatttaccagacgtttacaaagagggagatttacaaacgattcagcaaccgatcgactttttcggatttaactattattcaacagcaacattaaaagattggaaaaaaggtgaccgtgaaccgatcgtatttgaacatgtgagcacaggaagacctgtgacggatatgaattgggaagtgaatccaaacggtttgtttgatttaatggtgcgattgaaaaaagattatggcgatattccattatacattaccgaaaacggtgctgcatacaaagatcgcgtcaacgaaaatggtgaagtagaagatgatgagcgagttgcttatatacgagagcatttaatcgcttgccaccgcgcgattgaacaaggcgtcaatttaaaaggatattatgtatggtcgctgttcgataattttgagtgggcatttggatatgataagcgctttgggattgtatacgtggattatgaaacgctagagcgcatcccgaaaaagagtgcattatggtataaggaaacgattataaacaacggattgaaagcagaaaaagataaaagatctcatcaccatcaccatcactaa

SEQ ID NO: 52 - DNA, 1386 bp, Artificial Sequence
  Derived by Lab Evolution
atgcttgagtttccgaaagattttatttggggagctgcaacttcatcgtatcaaattgaaggaacagcgactggagaagataaaatttactcgatctgggatcacttttcccgcattcctggcaaaatagcgaatggggataatggcgatattgcaattgatcattacaatcgttatgttgaagacatcgcattaatgaaagcgcttcatttgaaagcgtatcgattttcgactagttgggcgagactttattgtgaaacgccagggaagtttaacgaaaaaggtttagatttttataagcgtcttgtaaatgagctgctagagaacggtatcgagccaatgttgaccatttatcattgggatatgccacaagctcttcaagagaaaggtggctgggaaaatcgtgatatcgttcaatacttccaagaatacgctgctttcctttacgagaatcttggggatgtcgtgaaaaaatggattacgcataatgagccgtgggttgtcacctatttaggatatgggaatggcgaacatgccccagggattcaaaactttacatcatttttaaaagcagcacatcatgttcttctctcacacggggaagcggtaaaagcgtttcgagcaatcggtccgaaagatggggaaattggtattacgttgaatttgacacctggatatgcggttgatccgaaagatgaaaaagcagttgatgccgctcgaaaatgggacggctttatgaatcgttggtttttagatcctgtatttaagggacaatatccagcagatatgttagaagtgtataaagattatttaccagacgtttacaaagagggagatttacaaacgattcagcaaccgatcgactttttcggatttaactattattcaacagcaacattaaaagattggaaaaaaggtgaccgtgaaccgatcgtatttgaacatgtgagcacaggaagacctgtgacggatatgaattgggaagtgaatccaaacggtttgtttgatttaatggtgcgattgaaaaaagattatggcgatattccattatacattaccgaaaacggtgctgcatacaaagatcgcgtcaacgaacaaggtgaagtagaagatgatgagcgagttgcttatatacgagagcatttaatcgcttgccaccgcgcgattgaacaaggcgtcaatttaaaaggatattatgtatggtcgctgttcgataattttgagtgggcatttggatatgataagcgctttgggattgtatacgtggattatgaaacgctagagcgcatcccgaaaaagagtgcattatggtataaggaaacgattataaacaacggattgaaagcagaaaaagataaaagatctcatcaccatcaccatcactaa

SEQ ID NO: 53 - DNA, 1386 bp, Artificial Sequence
  Derived by Lab Evolution
atgcttatgtttccgaaagattttatttggggagctgcaacttcatcgtatcaaattgaaggaacagcgactggagaagataaaatttactcgatctgggatcacttttcccgcattcctggcaaaatagcgaatggggataatggcgatattgcaattgatcattacaatcgttatgttgaagacatcgcattaatgaaagcgcttcatttgaaagcgtatcgattttcgactagttgggcgagactttattgtgaaacgccagggaagtttaacgaaaaaggtttagatttttataagcgtcttgtaaatgagctgctagagaacggtatcgagccaatgttgaccatttatcattgggatatgccacaagctcttcaagagaaaggtggctgggaaaatcgtgatatcgttcaatacttccaagaatacgctgctttcctttacgagaatcttggggatgtcgtgaaaaaatggattacgcataatgagccgtgggttgtcacctatttaggatatgggaatggcgaacatgccccagggattcaaaactttacatcatttttaaaagcagcacatcatgttcttctctcacacggggaagcggtaaaagcgtttcgagcaatcggtccgaaagatggggaaattggtattacgttgaatttgacacctggatatgcggttgatccgaaagatgaaaaagcagttgatgccgctcgaaaatgggacggctttatgaatcgttggtttttagatcctgtatttaagggacaatatccagcagatatgttagaagtgtataaagattatttaccagacgtttacaaagagggagatttacaaacgattcagcaaccgatcgactttttcggatttaactattattcaacagcaacattaaaagattggaaaaaaggtgaccgtgaaccgatcgtatttgaacatgtgagcacaggaagacctgtgacggatatgaattgggaagtgaatccaaacggtttgtttgatttaatggtgcgattgaaaaaagattatggcgatattccattatacattaccgaaaacggtgctgcatacaaagatcgcgtcaacgaacaaggtgaagtagaagatgatgagcgagttgcttatatacgagagcatttaatcgcttgccaccgcgcgattgaacaaggcgtcaatttaaaaggatattatgtatggtcgctgttcgataattttgagtgggcatttggatatgataagcgctttgggattgtatacgtggattatgaaacgctagagcgcatcccgaaaaagagtgcattatggtataaggaaacgattataaacaacggattgaaagcagaaaaagataaaagatctcatcaccatcaccatcactaa

SEQ ID NO: 54 - DNA, 1386 bp, Artificial Sequence
  Derived by Lab Evolution
atgcttcggtttccgaaagattttatttggggagctgcaacttcatcgtatcaaattgaaggaacagcgactggagaagataaaatttactcgatctgggatcacttttcccgcattcctggcaaaatagcgaatggggataatggcgatattgcaattgatcattacaatcgttatgttgaagacatcgcattaatgaaagcgcttcatttgaaagcgtatcgattttcgactagttgggcgagactttattgtgaaacgccagggaagtttaacgaaaaaggtttagatttttataagcgtcttgtaaatgagctgctagagaacggtatcgagccaatgttgaccatttatcattgggatatgccacaagctcttcaagagaaaggtggctgggaaaatcgtgatatcgttcaatacttccaagaatacgctgctttcctttacgagaatcttggggatgtcgtgaaaaaatggattacgcataatgagccgtgggttgtcacctatttaggatatgggaatggcgaacatgccccagggattcaaaactttacatcatttttaaaagcagcacatcatgttcttctctcacacggggaagcggtaaaagcgtttcgagcaatcggtccgaaagatggggaaattggtattacgttgaatttgacacctggatatgcggttgatccgaaagatgaaaaagcagttgatgccgctcgaaaatgggacggctttatgaatcgttggtttttagatcctgtatttaagggacaatatccagcagatatgttagaagtgtataaagattatttaccagacgtttacaaagagggagatttacaaacgattcagcaaccgatcgactttttcggatttaactattattcaacagcaacattaaaagattggaaaaaaggtgaccgtgaaccgatcgtatttgaacatgtgagcacaggaagacctgtgacggatatgaattgggaagtgaatccaaacggtttgtttgatttaatggtgcgattgaaaaaagattatggcgatattccattatacattaccgaaaacggtgctgcatacaaagatcgcgtcaacgaacaaggtgaagtagaagatgatgagcgagttgcttatatacgagagcatttaatcgcttgccaccgcgcgattgaacaaggcgtcaatttaaaaggatattatgtatggtcgctgttcgataattttgagtgggcatttggatatgataagcgctttgggattgtatacgtggattatgaaacgctagagcgcatcccgaaaaagagtgcattatggtataaggaaacgattataaacaacggattgaaagcagaaaaagataaaagatctcatcaccatcaccatcactaa

SEQ ID NO: 55 - DNA, 1386 bp, Artificial Sequence
  Derived by Lab Evolution
atgcttcagtttccgaaagattttatttggggagctgcaacttcatcgtatcaaattgaaggaacagcgactggagaagataaaatttactcgatctgggatcacttttcccgcattcctggcaaaatagcgaatggggataatggcgatattgcaattgatcattacaatcgttatgttgaagacatcgcattaatgaaagcgcttcatttgaaagcgtatcgattttcgactagttgggcgagactttattgtgaaacgccagggaagtttaacgaaaaaggtttagatttttataagcgtcttgtaaatgagctgctagagaacggtatcgagccaatgttgaccatttatcattgggatatgccacaagctcttcaagagaaaggtggctgggaaaatcgtgatatcgttcaatacttccaagaatacgctgctttcctttacgagaatcttggggatgtcgtgaaaaaatggattacgcataatgagccgtgggttgtcacctatttaggatatgggaatggcgaacatgccccagggattcaaaactttacatcatttttaaaagcagcacatcatgttcttctctcacacggggaagcggtaaaagcgtttcgagcaatcggtccgaaagatggggaaattggtattacgttgaatttgacacctggatatgcggttgatccgaaagatgaaaaagcagttgatgccgctcgaaaatgggacggctttatgaatcgttggtttttagatcctgtatttaagggacaatatccagcagatatgttagaagtgtataaagattatttaccagacgtttacaaagagggagatttacaaacgattcagcaaccgatcgactttttcggatttaactattattcaacagcaacattaaaagattggaaaaaaggtgaccgtgaaccgatcgtatttgaacatgtgagcacaggaagacctgtgacggatatgaattgggaagtgaatccaaacggtttgtttgatttaatggtgcgattgaaaaaagattatggcgatattccattatacattaccgaaaacggtgctgcatacaaagatcgcgtcaacgaacaaggtgaagtagaagatgatgagcgagttgcttatatacgagagcatttaatcgcttgccaccgcgcgattgaacaaggcgtcaatttaaaaggatattatgtatggtcgctgttcgataattttgagtgggcatttggatatgataagacttttgggattgtatacgtggattatgaaacgctagagcgcatcccgaaaaagagtgcattatggtataaggaaacgattataaacaacggattgaaagcagaaaaagataaaagatctcatcaccatcaccatcactaa

SEQ ID NO: 56 - DNA, 1386 bp, Artificial Sequence
  Derived by Lab Evolution
atgcttcagtttccgaaagattttatttggggagctgcaacttcatcgtatcaaattgaaggaacagcgactggagaagataaaatttactcgatctgggatcacttttcccgcattcctggcaaaatagcgaatggggataatggcgatattgcaattgatcattacaatcgttatgttgaagacatcgcattaatgaaagcgcttcatttgaaagcgtatcgattttcgactagttgggcgagactttattgtgaaacgccagggaagtttaacgaaaaaggtttagatttttataagcgtcttgtaaatgagctgctagagaacggtatcgagccaatgttgaccatttatcattgggatatgccacaagctcttcaagagaaaggtggctgggaaaatcgtgatatcgttcaatacttccaagaatacgctgctttcctttacgagaatcttggggatgtcgtgaaaaaatggattacgcataatgagccgtgggttgtcacctatttaggatatgggaatggcgaacatgccccagggattcaaaactttacatcatttttaaaagcagcacatcatgttcttctctcacacggggaagcggtaaaagcgtttcgagcaatcggtccgaaagatggggaaattggtattacgttgaatttgacacctggatatgcggttgatccgaaagatgaaaaagcagttgatgccgctcgaaaatgggacggctttatgaatcgttggtttttagatcctgtatttaagggacaatatccagcagatatgttagaagtgtataaagattatttaccagacgtttacaaagagggagatttacaaacgattcagcaaccgatcgactttttcggatttaactattatactacagcaacattaaaagattggaaaaaaggtgaccgtgaaccgatcgtatttgaacatgtgagcacaggaagacctgtgacggatatgaattgggaagtgaatccaaacggtttgtttgatttaatggtgcgattgaaaaaagattatggcgatattccattatacattaccgaaaacggtgctgcatacaaagatcgcgtcaacgaacaaggtgaagtagaagatgatgagcgagttgcttatatacgagagcatttaatcgcttgccaccgcgcgattgaacaaggcgtcaatttaaaaggatattatgtatggtcgctgttcgataattttgagtgggcatttggatatgataagcgctttgggattgtatacgtggattatgaaacgctagagcgcatcccgaaaaagagtgcattatggtataaggaaacgattataaacaacggattgaaagcagaaaaagataaaagatctcatcaccatcaccatcactaa

SEQ ID NO: 57 - DNA, 1386 bp, Artificial Sequence
  Derived by Lab Evolution
atgcttcagtttccgaaagattttatttggggagctgcaacttcatcgtatcaaattgaaggaacagcgactggagaagataaaatttactcgatctgggatcacttttcccgcattcctggcaaaatagcgaatggggataatggcgatattgcaattgatcattacaatcgttatgttgaagacatcgcattaatgaaagcgcttcatttgaaagcgtatcgattttcgactagttgggcgagactttattgtgaaacgccagggaagtttaacgaaaaaggtttagatttttataagcgtcttgtaaatgagctgctagagaacggtatcgagccaatgttgaccatttatcattgggatatgccacaagctcttcaagagaaaggtggctgggaaaatcgtgatatcgttcaatacttccaagaatacgctgctttcctttacgagaatcttggggatgtcgtgaaaaaatggattacgcataatgagccgtgggttgtcacctatttaggatatgggaatggcgaacatgccccagggattcaaaactttacatcatttttaaaagcagcacatcatgttcttctctcacacggggaagcggtaaaagcgtttcgagcaatcggtccgaaagatggggaaattggtattacgttgaatttgacacctggatatgcggttgatccgaaagatgaaaaagcagttgatgccgctcgaaaatgggacggctttatgaatcgttggtttttagatcctgtatttaagggacaatatccagcagatatgttagaagtgtataaagattatttaccagacgtttacaaagagggagatttacaaacgattcagcaaccgatcgactttttcggatttaactattattcaacagcaacattaaaagattggaaaaaaggtgaccgtgaaccgatcgtatttgaacatgtgaagacaggaagacctgtgacggatatgaattgggaagtgaatccaaacggtttgtttgatttaatggtgcgattgaaaaaagattatggcgatattccattatacattaccgaaaacggtgctgcatacaaagatcgcgtcaacgaacaaggtgaagtagaagatgatgagcgagttgcttatatacgagagcatttaatcgcttgccaccgcgcgattgaacaaggcgtcaatttaaaaggatattatgtatggtcgctgttcgataattttgagtgggcatttggatatgataagcgctttgggattgtatacgtggattatgaaacgctagagcgcatcccgaaaaagagtgcattatggtataaggaaacgattataaacaacggattgaaagcagaaaaagataaaagatctcatcaccatcaccatcactaa

SEQ ID NO: 58 - DNA, 1386 bp, Artificial Sequence
  Derived by Lab Evolution
atgcttcagtttccgaaagattttatttggggagctgcaacttcatcgtatcaaattgaaggaacagcgactggagaagataaaatttactcgatctgggatcacttttcccgcattcctggcaaaatagcgaatggggataatggcgatattgcaattgatcattacaatcgttatgttgaagacatcgcattaatgaaagcgcttcatttgaaagcgtatcgattttcgactagttgggcgagactttattgtgaaacgccagggaagtttaacgaaaaaggtttagatttttataagcgtcttgtaaatgagctgctagagaacggtatcgagccaatgttgaccatttatcattgggatatgccacaagctcttcaagagaaaggtggctgggaaaatcgtgatatcgttcaatacttccaagaatacgctgctttcctttacgagaatcttggggatgtcgtgaaaaaatggattacgcataatgagccgtgggttgtcacctatttaggatatgggaatggcgaacatgccccagggattcaaaactttacatcatttttaaaagcagcacatcatgttcttctctcacacggggaagcggtaaaagcgtttcgagcaatcggtccgaaagatggggaaattggtattacgttgaatttgacacctggatatgcggttgatccgaaagatgaaaaagcagttgatgccgctcgaaaatgggacggctttatgaatcgttggtttttagatcctgtatttaagggacaatatccagcagatatgttagaagtgtataaagattatttaccagacgtttacaaagagggagatttacaaacgattcagcaaccgatcgactttttcggatttaactattattcaacagcaacattaaaagattggaaaaaaggtgaccgtgaaccgatcgtatttgaacatgtgagcacaggaagacctgtgacggatatgaattgggaagtgaatccaaacggtttgtttgatttaatggtgcgattgaaaaaagattatggcgatattccattatacattaccgaaaacggtgctgcatacaaagatcgcgtcaacgaacaaggtgaagtagaagatgatgagcgagttgcttatatacgagagcatttaatcgcttgccaccgcgcgattgaacaaggcgtcaatttaaaaggatattatgtatggtctctgttcgataattttgagtgggcatttggatatgataagcgctttgggattgtatacgtggattatgaaacgctagagcgcatcccgaaaaagagtgcattatggtataaggaaacgattataaacaacggattgaaagcagaaaaagataaaagatctcatcaccatcaccatcactaa

SEQ ID NO: 59 - DNA, 1386 bp, Artificial Sequence
  Derived by Lab Evolution
atgcttcagtttccgaaagattttatttggggagctgcaacttcatcgtatcaaattgaaggaacagcgactggagaagataaaatttactcgatctgggatcacttttcccgcattcctggcaaaatagcgaatggggataatggcgatattgcaattgatcattacaatcgttatgttgaagacatcgcattaatgaaagcgcttcatttgaaagcgtatcgattttcgactagttgggcgagactttattgtgaaacgccagggaagtttaacgaaaaaggtttagatttttataagcgtcttgtaaatgagctgctagagaacggtatcgagccaatgttgaccatttatcattgggatatgccacaagctcttcaagagaaaggtggctgggaaaatcgtgatatcgttcaatacttccaagaatacgctgctttcctttacgagaatcttggggatgtcgtgaaaaaatggattacgcataatgagccgtgggttgtcacctatttaggatatgggaatggcgaacatgccccagggattcaaaactttacatcatttttaaaagcagcacatcatgttcttctctcacacggggaagcggtaaaagcgtttcgagcaatcggtccgaaagatggggaaattggtattacgttgaatttgacacctggatatgcggttgatccgaaagatgaaaaagcagttgatgccgctcgaaaatgggacggctttatgaatcgttggtttttagatcctgtatttaagggacaatatccagcagatatgttagaagtgtataaagattatttaccagacgtttacaaagagggagatttacaaacgattcagcaaccgatcgactttttcggatttaactattattcaacagcaacattaaaagattggaaaaaaggtgaccgtgaaccgatcgtatttgaacatgtgagcacaggaagacctgtgacggatatgaattgggaagtgaatccaaacggtttgtttgatttaatggtgcgattgaaaaaagattatggcgatattccattatacattaccgaaaacggtgctgcatacaaagatcgcgtcaacgaacaaggtgaagtagaagatgatgagcgagttgcttatatacgagagcatttaatcgcttgccaccgcgcgattgaacaaggcgtcaatttaaaaggatattatgtatggacgctgttcgataattttgagtgggcatttggatatgataagcgctttgggattgtatacgtggattatgaaacgctagagcgcatcccgaaaaagagtgcattatggtataaggaaacgattataaacaacggattgaaagcagaaaaagataaaagatctcatcaccatcaccatcactaa

SEQ ID NO: 60 - DNA, 1386 bp, Artificial Sequence
  Derived by Lab Evolution
atgcttcagtttccgaaagattttatttggggagctgcaacttcatcgtatcaaattgaaggaacagcgactggagaagataaaatttactcgatctgggatcacttttcccgcattcctggcaaaatagcgaatggggataatggcgatattgcaattgatcattacaatcgttatgttgaagacatcgcattaatgaaagcgcttcatttgaaagcgtatcgattttcgactagttgggcgagactttattgtgaaacgccagggaagtttaacgaaaaaggtttagatttttataagcgtcttgtaaatgagctgctagagaacggtatcgagccaatgttgaccatttatcattgggatatgccacaagctcttcaagagaaaggtggctgggaaaatcgtgatatcgttcaatacttccaagaatacgctgctttcctttacgagaatcttggggatgtcgtgaaaaaatggattacgcataatgagccgtgggttgtcacctatttaggatatgggaatggcgaacatgccccagggattcaaaactttacatcatttttaaaagcagcacatcatgttcttctctcacacggggaagcggtaaaagcgtttcgagcaatcggtccgaaagatggggaaattggtattgcgttgaatttgacacctggatatgcggttgatccgaaagatgaaaaagcagttgatgccgctcgaaaatgggacggctttatgaatcgttggtttttagatcctgtatttaagggacaatatccagcagatatgttagaagtgtataaagattatttaccagacgtttacaaagagggagatttacaaacgattcagcaaccgatcgactttttcggatttaactattattcaacagcaacattaaaagattggaaaaaaggtgaccgtgaaccgatcgtatttgaacatgtgagcacaggaagacctgtgacggatatgaattgggaagtgaatccaaacggtttgtttgatttaatggtgcgattgaaaaaagattatggcgatattccattatacattaccgaaaacggtgctgcatacaaagatcgcgtcaacgaacaaggtgaagtagaagatgatgagcgagttgcttatatacgagagcatttaatcgcttgccaccgcgcgattgaacaaggcgtcaatttaaaaggatattatgtatggtcgctgttcgataattttgagtgggcatttggatatgataagcgctttgggattgtatacgtggattatgaaacgctagagcgcatcccgaaaaagagtgcattatggtataaggaaacgattataaacaacggattgaaagcagaaaaagataaaagatctcatcaccatcaccatcactaa

SEQ ID NO: 61 - DNA, 1386 bp, Artificial Sequence
  Derived by Lab Evolution
atgcttcagtttccgaaagattttatttggggagctgcaacttcatcgtatcaaattgaaggaacagcgactggagaagataaaatttactcgatctgggatcacttttcccgcattcctggcaaaatagcgaatggggataatggcgatattgcaattgatcattacaatcgttatgttgaagacatcgcattaatgaaagcgcttcatttgaaagcgtatcgattttcgactagttgggcgagactttattgtgaaacgccagggaagtttaacgaaaaaggtttagatttttataagcgtcttgtaaatgagctgctagagaacggtatcgagccaatgttgaccatttatcattgggatatgccacaagctcttcaagagaaaggtggctgggaaaatcgtgatatcgttcaatacttccaagaatacgctgctttcctttacgagaatcttggggatgtcgtgaaaaaatggattacgcataatgagccgtgggttgtcacctatttaggatatgggaatggcgaacatgccccagggattcaaaactttacatcatttttaaaagcagcacatcatgttcttctctcacacggggaagcggtaaaagcgtttcgagcaatcggtccgaaagatggggaaattggtattgctttgaatttgacacctggatatgcggttgatccgaaagatgaaaaagcagttgatgccgctcgaaaatgggacggctttatgaatcgttggtttttagatcctgtatttaagggacaatatccagcagatatgttagaagtgtataaagattatttaccagacgtttacaaagagggagatttacaaacgattcagcaaccgatcgactttttcggatttaactattattcaacagcaacattaaaagattggaaaaaaggtgaccgtgaaccgatcgtatttgaacatgtgagcacaggaagacctgtgacggatatgaattgggaagtgaatccaaacggtttgtttgatttaatggtgcgattgaaaaaagattatggcgatattccattatacattaccgaaaacggtgctgcatacaaagatcgcgtcaacgaacaaggtgaagtagaagatgatgagcgagttgcttatatacgagagcatttaatcgcttgccaccgcgcgattgaacaaggcgtcaatttaaaaggatattatgtatggtcgctgttcgataattttgagtgggcatttggatatgataagcgctttgggattgtatacgtggattatgaaacgctagagcgcatcccgaaaaagagtgcattatggtataaggaaacgattataaacaacggattgaaagcagaaaaagataaaagatctcatcaccatcaccatcactaa

SEQ ID NO: 62 - DNA, 1386 bp, Artificial Sequence
  Derived by Lab Evolution
atgcttcagtttccgaaagattttatttggggagctgcaacttcatcgtatcaaattgaaggaacagcgactggagaagataaaatttactcgatctgggatcacttttcccgcattcctggcaaaatagcgaatggggataatggcgatattgcaattgatcattacaatcgttatgttgaagacatcgcattaatgaaagcgcttcatttgaaagcgtatcgattttcgactagttgggcgagactttattgtgaaacgccagggaagtttaacgaaaaaggtttagatttttataagcgtcttgtaaatgagctgctagagaacggtatcgagccaatgttgaccatttatcattgggatatgccacaagctcttcaagagaaaggtggctgggaaaatcgtgatatcgttcaatacttccaagaatacgctgctttcctttacgagaatcttggggatgtcgtgaaaaaatggattacgcataatgagccgtgggttgtcacctatttaggatatgggaatggcgaacatgccccagggattcaaaactttacatcatttttaaaagcagcacatcatgttcttctctcacacggggaagcggtaaaagcgtttcgagcaatcggtccgaaagatggggaaattggtattagtttgaatttgacacctggatatgcggttgatccgaaagatgaaaaagcagttgatgccgctcgaaaatgggacggctttatgaatcgttggtttttagatcctgtatttaagggacaatatccagcagatatgttagaagtgtataaagattatttaccagacgtttacaaagagggagatttacaaacgattcagcaaccgatcgactttttcggatttaactattattcaacagcaacattaaaagattggaaaaaaggtgaccgtgaaccgatcgtatttgaacatgtgagcacaggaagacctgtgacggatatgaattgggaagtgaatccaaacggtttgtttgatttaatggtgcgattgaaaaaagattatggcgatattccattatacattaccgaaaacggtgctgcatacaaagatcgcgtcaacgaacaaggtgaagtagaagatgatgagcgagttgcttatatacgagagcatttaatcgcttgccaccgcgcgattgaacaaggcgtcaatttaaaaggatattatgtatggtcgctgttcgataattttgagtgggcatttggatatgataagcgctttgggattgtatacgtggattatgaaacgctagagcgcatcccgaaaaagagtgcattatggtataaggaaacgattataaacaacggattgaaagcagaaaaagataaaagatctcatcaccatcaccatcactaa

SEQ ID NO: 63 - DNA, 1386 bp, Artificial Sequence
  Derived by Lab Evolution
atgcttcagtttccgaaagattttatttggggagctgcaacttcatcgtatcaaattgaaggaacagcggatggagaagataaaatttactcgatctgggatcacttttcccgcattcctggcaaaatagcgaatggggataatggcgatattgcaattgatcattacaatcgttatgttgaagacatcgcattaatgaaagcgcttcatttgaaagcgtatcgattttcgactagttgggcgagactttattgtgaaacgccagggaagtttaacgaaaaaggtttagatttttataagcgtcttgtaaatgagctgctagagaacggtatcgagccaatgttgaccatttatcattgggatatgccacaagctcttcaagagaaaggtggctgggaaaatcgtgatatcgttcaatacttccaagaatacgctgctttcctttacgagaatcttggggatgtcgtgaaaaaatggattacgcataatgagccgtgggttgtcacctatttaggatatgggaatggcgaacatgccccagggattcaaaactttacatcatttttaaaagcagcacatcatgttcttctctcacacggggaagcggtaaaagcgtttcgagcaatcggtccgaaagatggggaaattggtattacgttgaatttgacacctggatatgcggttgatccgaaagatgaaaaagcagttgatgccgctcgaaaatgggacggctttatgaatcgttggtttttagatcctgtatttaagggacaatatccagcagatatgttagaagtgtataaagattatttaccagacgtttacaaagagggagatttacaaacgattcagcaaccgatcgactttttcggatttaactattattcaacagcaacattaaaagattggaaaaaaggtgaccgtgaaccgatcgtatttgaacatgtgagcacaggaagacctgtgacggatatgaattgggaagtgaatccaaacggtttgtttgatttaatggtgcgattgaaaaaagattatggcgatattccattatacattaccgaaaacggtgctgcatacaaagatcgcgtcaacgaacaaggtgaagtagaagatgatgagcgagttgcttatatacgagagcatttaatcgcttgccaccgcgcgattgaacaaggcgtcaatttaaaaggatattatgtatggtcgctgttcgataattttgagtgggcatttggatatgataagcgctttgggattgtatacgtggattatgaaacgctagagcgcatcccgaaaaagagtgcattatggtataaggaaacgattataaacaacggattgaaagcagaaaaagataaaagatctcatcaccatcaccatcactaa

SEQ ID NO: 64 - DNA, 1386 bp, Artificial Sequence
  Derived by Lab Evolution
atgcttcagtttccgaaagattttatttggggagctgcaacttcatcgtatcaaattgaaggaacagcgcatggagaagataaaatttactcgatctgggatcacttttcccgcattcctggcaaaatagcgaatggggataatggcgatattgcaattgatcattacaatcgttatgttgaagacatcgcattaatgaaagcgcttcatttgaaagcgtatcgattttcgactagttgggcgagactttattgtgaaacgccagggaagtttaacgaaaaaggtttagatttttataagcgtcttgtaaatgagctgctagagaacggtatcgagccaatgttgaccatttatcattgggatatgccacaagctcttcaagagaaaggtggctgggaaaatcgtgatatcgttcaatacttccaagaatacgctgctttcctttacgagaatcttggggatgtcgtgaaaaaatggattacgcataatgagccgtgggttgtcacctatttaggatatgggaatggcgaacatgccccagggattcaaaactttacatcatttttaaaagcagcacatcatgttcttctctcacacggggaagcggtaaaagcgtttcgagcaatcggtccgaaagatggggaaattggtattacgttgaatttgacacctggatatgcggttgatccgaaagatgaaaaagcagttgatgccgctcgaaaatgggacggctttatgaatcgttggtttttagatcctgtatttaagggacaatatccagcagatatgttagaagtgtataaagattatttaccagacgtttacaaagagggagatttacaaacgattcagcaaccgatcgactttttcggatttaactattattcaacagcaacattaaaagattggaaaaaaggtgaccgtgaaccgatcgtatttgaacatgtgagcacaggaagacctgtgacggatatgaattgggaagtgaatccaaacggtttgtttgatttaatggtgcgattgaaaaaagattatggcgatattccattatacattaccgaaaacggtgctgcatacaaagatcgcgtcaacgaacaaggtgaagtagaagatgatgagcgagttgcttatatacgagagcatttaatcgcttgccaccgcgcgattgaacaaggcgtcaatttaaaaggatattatgtatggtcgctgttcgataattttgagtgggcatttggatatgataagcgctttgggattgtatacgtggattatgaaacgctagagcgcatcccgaaaaagagtgcattatggtataaggaaacgattataaacaacggattgaaagcagaaaaagataaaagatctcatcaccatcaccatcactaa

SEQ ID NO: 65 - DNA, 1386 bp, Artificial Sequence
  Derived by Lab Evolution
atgcttcagtttccgaaagattttatttggggagctgcaacttcatcgtatcaaattgaaggaacagcgactggagaagataaaatttactcgatctgggatcacttttcccgcattcctggcaaaatagcgaatggggataatggcgatattgcaattgatcattacaatcgttatgttgaagacatcgcattaatgaaagcgcttcatttgaaagcgtatcgattttcgactagttgggcgagactttattgtgaaacgccagggaagtttaacgaaaaaggtttagatttttataagcgtcttgtaaatgagctgctagagaacggtatcgagccaatgttgaccatttatcattgggatatgccacaagctcttcaagagaaaggtggctgggaaaatcgtgatatcgttcaatacttccaagaatacgctgctttcctttacgagaatcttggggatgtcgtgaaaaaatggattacgcataatgagccgtgggttgtcacctatttaggatatgggaatggcgaacatgccccagggattcaaaactttacatcatttttaaaagcagcacatcatgttcttctctcacacggggaagcggtaaaagcgtttcgagcaatcggtccgaaagatggggaaattggtattacgttgaatttgacacctggatatgcggttgatccgaaagatgaaaaagcagttgatgccgctcgaaaatgggacggctttatgaatcgttggtttttagatcctgtatttaagggacaatatccagcagatatgttagaagtgtataaagattatttaccagacgtttacaaagagggagatttacaaacgattcagcaaccgatcgactttttcggatttaactattattcatctgcaacattaaaagattggaaaaaaggtgaccgtgaaccgatcgtatttgaacatgtgagcacaggaagacctgtgacggatatgaattgggaagtgaatccaaacggtttgtttgatttaatggtgcgattgaaaaaagattatggcgatattccattatacattaccgaaaacggtgctgcatacaaagatcgcgtcaacgaacaaggtgaagtagaagatgatgagcgagttgcttatatacgagagcatttaatcgcttgccaccgcgcgattgaacaaggcgtcaatttaaaaggatattatgtatggtcgctgttcgataattttgagtgggcatttggatatgataagcgctttgggattgtatacgtggattatgaaacgctagagcgcatcccgaaaaagagtgcattatggtataaggaaacgattataaacaacggattgaaagcagaaaaagataaaagatctcatcaccatcaccatcactaa

SEQ ID NO: 66 - DNA, 1386 bp, Artificial Sequence
  Derived by Lab Evolution
atgcttcagtttccgaaagattttatttggggagctgcaacttcatcgtatcaaattgaaggaacagcgactggagaagataaaatttactcgatctgggatcacttttcccgcattcctggcaaaatagcgaatggggataatggcgatattgcaattgatcattacaatcgttatgttgaagacatcgcattaatgaaagcgcttcatttgaaagcgtatcgattttcgactagttgggcgagactttattgtgaaacgccagggaagtttaacgaaaaaggtttagatttttataagcgtcttgtaaatgagctgctagagaacggtatcgagccaatgttgaccatttatcattgggatatgccacaagctcttcaagagaaaggtggctgggaaaatcgtgatatcgttcaatacttccaagaatacgctgctttcctttacgagaatcttggggatgtcgtgaaaaaatggattacgcataatgagccgtgggttgtcacctatttaggatatgggaatggcgaacatgccccagggattcaaaactttacatcatttttaaaagcagcacatcatgttcttctctcacacggggaagcggtaaaagcgtttcgagcaatcggtccgaaagatggggaaattggtattacgttgaatttgacacctggatatgcggttgatccgaaagatgaaaaagcagttgatgccgctcgaaaatgggacggctttatgaatcgttggtttttagatcctgtatttaagggacaatatccagcagatatgttagaagtgtataaagattatttaccagacgtttacaaagagggagatttacaaacgattcagcaaccgatcgactttttcggatttaactattattcaacagcaacattaaaagattggaaaaaaggtgaccgtgaaccgatcgtatttgaacatgtgagcacaggaagacctgtgacggatatgaattgggaagtgaatccaaacggtttgtttgatttaatggtgcgattgaaaaaagattatggcgatattccattatacattaccgaaaacggtgctgcatacaaagatcgcgtcaacgaacaaggtgaagtagaagatgatgagcgagttgcttatatacgagagcatttaatcgcttgccaccgcgcgattgaacaaggcgtcaatttaaaaggatattatgtatggtcgctgttcgataattttgagtgggcatttggatatgataagcgctttgggattgtatacgtggattatgaaacgctagagcgcatcccgaaaaagagtgcattatggtataaggaagtgattataaacaacggattgaaagcagaaaaagataaaagatctcatcaccatcaccatcactaa

SEQ ID NO: 67 - DNA, 1386 bp, Artificial Sequence
  Derived by Lab Evolution
atgcttcagtttccgaaagattttatttggggagctgcaacttcatcgtatcaaattgaaggaacagcgactggagaagataaaatttactcgatctgggatcacttttcccgcattcctggcaaaatagcgaatggggataatggcgatattgcaattgatcattacaatcgttatgttgaagacatcgcattaatgaaagcgcttcatttgaaagcgtatcgattttcgactagttgggcgagactttattgtgaaacgccagggaagtttaacgaaaaaggtttagatttttataagcgtcttgtaaatgagctgctagagaacggtatcgagccaatgttgaccatttatcattgggatatgccacaagctcttcaagagaaaggtggctgggaaaatcgtgatatcgttcaatacttccaagaatacgctgctttcctttacgagaatcttggggatgtcgtgaaaaaatggattacgcataatgagccgtgggttgtcacctatttaggatatgggaatggcgaacatgccccagggattcaaaactttacatcatttttaaaagcagcacatcatgttcttctctcacacggggaagcggtaaaagcgtttcgagcaatcggtccgaaagatggggaaattggtattacgttgaatttgacacctggatatgcggttgatccgaaagatgaaaaagcagttgatgccgctcgaaaatgggacggctttatgaatcgttggtttttagatcctgtatttaagggacaatatccagcagatatgttagaagtgtataaagattatttaccagacgtttacaaagagggagatttacaaacgattcagcaaccgatcgactttttcggatttaactattattcaacagcaacattaaaagattggaaaaaaggtgaccgtgaaccgatcgtatttgaacatgtgagcacaggaagacctgtgacggatatgaattgggaagtgaatccaaacggtttgtttgatttaatggtgcgattgaaaaaagattatggcgatattccattatacattaccgaaaacggtgctgcatacaaagatcgcgtcaacgaacaaggtgaagtagaagatgatgagcgagttgcttatatacgagagcatttaatcgcttgccaccgcgcgattgaacaaggcgtcaatttaaaaggatattatgtatggtcgctgttcgataattttgagtgggcatttggatatgataagcgctttgggattgtatacgtggattatgaaacgctagagcgcatcccgaaaaagagtgcattatggtataaggaagttattataaacaacggattgaaagcagaaaaagataaaagatctcatcaccatcaccatcactaa

SEQ ID NO: 68 - DNA, 1386 bp, Artificial Sequence
  Derived by Lab Evolution
atgcttcagtttccgaaagattttatttggggagctgcaacttcatcgtatcaaattgaaggaacagcgactggagaagataaaatttactcgatctgggatcacttttcccgcattcctggcaaaatagcgaatggggataatggcgatattgcaattgatcattacaatcgttatgttgaagacatcgcattaatgaaagcgcttcatttgaaagcgtatcgattttcgactagttgggcgagactttattgtgaaacgccagggaagtttaacgaaaaaggtttagatttttataagcgtcttgtaaatgagctgctagagaacggtatcgagccaatgttgaccatttatcattgggatatgccacaagctcttcaagagaaaggtggctgggaaaatcgtgatatcgttcaatacttccaagaatacgctgctttcctttacgagaatcttggggatgtcgtgaaaaaatggattacgcataatgagccgtgggctgtcacctatttaggatatgggaatggcgaacatgccccagggattcaaaactttacatcatttttaaaagcagcacatcatgttcttctctcacacggggaagcggtaaaagcgtttcgagcaatcggtccgaaagatggggaaattggtattacgttgaatttgacacctggatatgcggttgatccggaggatgaaaaagcagttgatgccgctcgaaaatgggacggctttatgaatcgttggtttttagatcctgtatttaagggacaatatccagcagatatgttagaagtgtataaagattatttaccagacgtttacaaagagggagatttacaaacgattcagcaaccgatcgactttttcggatttaactattattcaacagcaacattaaaagattggaaaaaaggtgaccgtgaaccgatcgtatttgaacatgtgagcacaggaagacctgtgacggatatgaattgggaagtgaatccaaacggtttgtttgatttaatggtgcgattgaaaaaagattatggcgatattccattatacattaccgaaaacggtgctgcatacaaagatcgcgtcaacgaacaaggtgaagtagaagatgatgagcgagttgcttatatacgagagcatttaatcgcttgccaccgcgcgattgaacaaggcgtcaatttaaaaggatattatgtatggtcgctgttcgataattttgagtgggcatttggatatgataagcgctttgggattgtatacgtggattatgaaacgctagagcgcatcccgaaaaagagtgcattatggtataaggaaacgattataaacaacggattgaaagcagaaaaagataaaagatctcatcaccatcaccatcactaa

SEQ ID NO: 69 - DNA, 1386 bp, Artificial Sequence
  Derived by Lab Evolution
atgcttcagtttccgaaagattttatttggggagctgcaacttcatcgtatcaaattgaaggaacagcgactggagaagataaaatttactcgatctgggatcacttttcccgcattcctggcaaaatagcgaatggggataatggcgatattgcaattgatcattacaatcgttatgttgaagacatcgcattaatgaaagcgcttcatttgaaagcgtatcgattttcgactagttgggcgagactttattgtgaaacgccagggaagtttaacgaaaaaggtttagatttttataagcgtcttgtaaatgagctgctagagaacggtatcgagccaatgttgaccatttatcattgggatatgccacaagctcttcaagagaaaggtggctgggaaaatcgtgatatcgttcaatacttccaagaatacgctgctttcctttacgagaatcttggggatgtcgtgaaaaaatggattacgcataatgagccgtgggttgtcacctatttaggatatgggaatggcgaacatgccccagggattcaaaactttacatcatttttaaaagcagcacatcatgttcttctctcacacggggaagcgccgaaagcgtttcgagcaatcggtccgaaagatggggaaattggtattacgttgaatttgacacctggatatgcggttgatccgaaagatgaaaaagcagttgatgccgctcgaaaatgggacggctttatgaatcgttggtttttagatcctgtatttaagggacaatatccagcagatatgttagaagtgtataaagattatttaccagacgtttacaaagagggagatttacaaacgattcagcaaccgatcgactttttcggatttaactattattcaacagcaacattaaaagattggaaaaaaggtgaccgtgaaccgatcgtatttgaacatgtgagcacaggaagacctgtgacggatatgaattgggaagtgaatccaaacggtttgtttgatttaatggtgcgattgaaaaaagattatggcgatattccattatacattaccgaaaacggtgctgcatacaaagatcgcgtcaacgaacaaggtgaagtagaagatgatgagcgagttgcttatatacgagagcatttaatcgcttgccaccgcgcgattgaacaaggcgtcaatttaaaaggatattatgtatggtcgctgttcgataattttgagtgggcatttggatatgataagcgctttgggattgtatacgtggattatgaaacgctagagcgcatcccgaaaaagagtgcattatggtataaggaaacgattataaacaacggattgaaagcagaaaaagataaaagatctcatcaccatcaccatcactaa

SEQ ID NO: 70 - DNA, 1386 bp, Artificial Sequence
  Derived by Lab Evolution
atgcttcagtttccgaaagattttatttggggagctgcaacttcatcgtatcaaattgaaggaacagcgactggagaagataaaatttactcgatctgggatcacttttcccgcattcctggcaaaatagcgaatggggataatggcgatattgcaattgatcattacaatcgttatgttgaagacatcgcattaatgaaagcgcttcatttgaaagcgtatcgattttcgactagttgggcgagactttattgtgaaacgccagggaagtttaacgaaaaaggtttagatttttataagcgtcttgtaaatgagctgctagagaacggtatcgagccaatgttgaccatttatcattgggatatgccacaagctcttcaagagaaaggtggctgggaaaatcgtgatatcgttcaatacttccaagaatacgctgctttcctttacgagaatcttggggatgtcgtgaaaaaatggattacgcataatgagccgtgggttgtcacctatttaggatatgggaatggcgaacatgccccagggattcaaaactttacatcatttttaaaagcagcacatcatgttcttctctcacacggggaagcggtaaaagcgtttcgagcaatcggtccgaaagatggggaaattggtattacgttgaatttgacacctggatatgcggttgatccgaaagatgaaaaagcagttgatgccgctcgaaaatgggacggctttatgaatcgttggtttttagatcctgtatttaagggacaatatccagcagatatgttagaagtgtataaagattatttaccagacgtttacaaagagggagatttacaaacgattcagcaaccgatcgactttttcggatttaactattattcaacagcaacattaaaagattggaaaaaaggtgaccgtgaaccgatcgtatttgaacatgtgagcacaggaagacctgtgacggatatgaattgggaagtgaatccaaacggtttgtttgatttaatggtgcgattgaaaaaagattatggcgatattccattatacattaccgaaaacggtgctgcatacaaagatcgcgtcaacgaacaaggtgaagtagaagatgatgagcgagttgcttatatacgagagcatttaatcgcttgccaccgcgcgattgaacaaggcgtcaatttaaaaggatattatgtatggtcgctgttcgataattttgagtgggcatttggatatgataagcgctttgggattctgtacgtggattatgaaacgctagagcgcatcccgaaaaagagtgcattatggtataaggaaacgattataaacaacggattgaaagcagaaaaagataaaagatctcatcaccatcaccatcactaa

SEQ ID NO: 71 - DNA, 1386 bp, Artificial Sequence
  Derived by Lab Evolution
atgcttcagtttccgaaagattttatttggggagctgcaacttcatcgtatcaaattgaaggaacagcgactggagaagataaaatttactcgatctgggatcacttttcccgcattcctggcaaaatagcgaatggggataatggcgatattgcaattgatcattacaatcgttatagggaagacatcgcattaatgaaagcgcttcatttgaaagcgtatcgattttcgactagttgggcgagactttattgtgaaacgccagggaagtttaacgaaaaaggtttagatttttataagcgtcttgtaaatgagctgctagagaacggtatcgagccaatgttgaccatttatcattgggatatgccacaagctcttcaagagaaaggtggctgggaaaatcgtgatatcgttcaatacttccaagaatacgctgctttcctttacgagaatcttggggatgtcgtgaaaaaatggattacgcataatgagccgtgggttgtcacctatttaggatatgggaatggcgaacatgccccagggattcaaaactttacatcatttttaaaagcagcacatcatgttcttctctcacacggggaagcggtaaaagcgtttcgagcaatcggtccgaaagatggggaaattggtattacgttgaatttgacacctggatatgcggttgatccgaaagatgaaaaagcagttgatgccgctcgaaaatgggacggctttatgaatcgttggtttttagatcctgtatttaagggacaatatccagcagatatgttagaagtgtataaagattatttaccagacgtttacaaagagggagatttacaaacgattcagcaaccgatcgactttttcggatttaactattattcaacagcaacattaaaagattggaaaaaaggtgaccgtgaaccgatcgtatttgaacatgtgagcacaggaagacctgtgacggatatgaattgggaagtgaatccaaacggtttgtttgatttaatggtgcgattgaaaaaagattatggcgatattccattatacattaccgaaaacggtgctgcatacaaagatcgcgtcaacgaacaaggtgaagtagaagatgatgagcgagttgcttatatacgagagcatttaatcgcttgccaccgcgcgattgaacaaggcgtcaatttaaaaggatattatgtatggtcgctgttcgataattttgagtgggcatttggatatgataagcgctttgggattgtatacgtggattatgaaacgctagagcgcatcccgaaaaagagtgcattatggtataaggaaacgattataaacaacggattgaaagcagaaaaagataaaagatctcatcaccatcaccatcactaa

SEQ ID NO: 72 - DNA, 1386 bp, Artificial Sequence
  Derived by Lab Evolution
atgcttcagtttccgaaagattttatttggggagctgcaacttcatcgtatcaaattgaaggaacagcgactggagaagataaaatttactcgatctgggatcacttttcccgcattcctggcaaaatagcgaatggggataatggcgatattgcaattgatcattacaatcgttatgttgaagacatcgcattaatgaaagcgcttcatttgaaagcgtatcgattttcgactagttgggcgagactttattgtgaaacgccagggaagtttaacgaaaaaggtttagatttttataagcgtcttgtaaatgagctgctagagaacggtatcgagccaatgttgaccatttatcattgggatatgccacaagctcttcaagagaaaggtggctgggaaaatcgtgatatcgttcaatacttccaagaatacgctgctttcctttacgagaatcttggggatgtcgtgaaaaaatggattacgcataatgagccgtgggttgtcacctatttaggatatgggaatggcgaacatgccccagggattcaaaactttacatcatttttaaaagcagcacatcatgttcttctctcacacggggaagcggtaaaagcgtttcgagcaatcggtccgaaagatggggaaattggtattacgttgaatttgacacctggatatgcggttgatccgaaagatgaaaaagcagttgatgccgctcgaaaatgggacggctttatgaatcgttggtttttagatcctgtatttaagggacaatatccagcagatatgttagaagtgtataaagattatttaccagacgtttacaaagagggagatttacaaacgattcagcaaccgatcgactttttcggatttaactattattcaacagcaacattaaaagattggaaaaaaggtgaccgtgaaccgatcgtatttgaacatgtgagcacaggaagacctgtgacggatatgaattgggaagtgaatccaaacggtttgtttgatttaatggtgcgattgaaaaaagattatggcgatattccattatacattaccgaaaacggtgctgcatacaaagatcgcgtcaacgaacaaggtgaagtagaagatgatgagcgagttgcttatatacgagagcatttaatcgcttgccaccgcgcgattgaacaaggcgtcaatttaaaaggatattatgtattttcgctgttcgataattttgagtgggcatttggatatgataagcgctttgggattgtatacgtggattatgaaacgctagagcgcatcccgaaaaagagtgcattatggtataaggaaacgattataaacaacggattgaaagcagaaaaagataaaagatctcatcaccatcaccatcactaa

SEQ ID NO: 73 - DNA, 1386 bp, Artificial Sequence
  Derived by Lab Evolution
atgcttcagtttccgaaagattttatttggggagctgcaacttcatcgtatcaaattgaaggaacagcgactggagaagataaaatttactcgatctgggatcacttttcccgcattcctggcaaaatagcgaatggggataatggcgatattgcaattgatcattacaatcgttatgttgaagacatcgcattaatgaaagcgcttcatttgaaagcgtatcgattttcgactagttgggcgagactttattgtgaaacgccagggaagtttaacgaaaaaggtttagatttttataagcgtcttgtaaatgagctgctagagaacggtatcgagccaatgttgaccatttatcattgggatatgccacaagctcttcaagagaaaggtggctgggaaaatcgtgatatcgttcaatacttccaagaatacgctgctttcctttacgagaatcttggggatgtcgtgaaaaaatggattacgcataatgagccgtgggttgtcacctatttaggatatgggaatggcgaacatgccccagggattcaaaactttacatcatttttaaaagcagcacatcatgttcttctctcacacggggaagcggtaaaagcgtttcgagcaatcggtccgaaagatggggaaattggtattacgttgaatttgacacctggatatgcggttgatccgaaagatgaaaaagcagttgatgccgctcgaaaatgggacggctttatgaatcgttggtttttagatcctgtatttaagggacaatatccagcagatatgttagaagtgtataaagattatttaccagacgtttacaaagagggagatttacaaacgattcagcaaccgatcgactttttcggatttaactattattcaacagcaacattaaaagattggaaaaaaggtgaccgtgaaccgatcgtatttgaacatgtgagcacaggaagacctgtgacggatatgaattgggaagtgaatccaaacggtttgtttgatttaatggtgcgattgaaaaaagattatggcgatattccattatacattaccgaaaacggtgctgcatacaaagatcgcgtcaacgaacaaggtgaagtagaagatgatgagcgagttgcttatatacgagagcatttaatcgcttgccaccgcgcgattgaacaaggcgtcaatttaaaaggatattttgtatggtcgctgttcgataattttgagtgggcatttggatatgataagcgctttgggattgtatacgtggattatgaaacgctagagcgcatcccgaaaaagagtgcattatggtataaggaaacgattataaacaacggattgaaagcagaaaaagataaaagatctcatcaccatcaccatcactaa

SEQ ID NO: 74 - DNA, 1386 bp, Artificial Sequence
  Derived by Lab Evolution
atgcttcagtttccgaaagattttatttggggagctgcaacttcatcgtatcaaattgaaggaacagcgactggagaagataaaatttactcgatctgggatcacttttcccgcattcctggcaaaatagcgaatggggataatggcgatattgcaattgatcattacaatcgttatgttgaagacatcgcattaatgaaagcgcttcatttgaaagcgtatcgattttcgactagttgggcgagactttattgtgaaacgccagggaagtttaacgaaaaaggtttagatttttataagcgtcttgtaaatgagctgctagagaacggtatcgagccaatgttgaccatttatcattgggatatgccacaagctcttcaagagaaaggtggctgggaaaatcgtgatatcgttcaatacttccaagaatacgctgctttcctttacgagaatcttggggatgtcgtgaaaaaatggattacgcataatgagccgtgggttgtcacctatttaggatatgggaatggcgaacatgccccagggattcaaaactttacatcatttttaaaagcagcacatcatgttcttctctcacacggggaagcggtaaaagcgtttcgagcaatcggtccgaaagatggggaaattggtattacgttgaatttgacacctggatatgcggttgatccgaaagatgaaaaagcagttgatgccgctcgaaaatgggacggctttatgaatcgttggtttttagatcctgtatttaagggacaatatccagcagatatgttagaagtgtataaagattatttaccagacgtttacaaagagggagatttacaaacgattcagcaaccgatcgactttttcggatttaactattattcaacagcaacattaaaagattggaaaaaaggtgaccgtgaaccgatcgtatttgaacatgtgagcacaggaagacctgtgacggatatgaattgggaagtgaatccaaacggtttgtttgatttaatggtgcgattgaaaaaagattatggcgatattccattatacattaccgaaaacggtgctgcatacaaagatcgcgtcaacgaacaaggtgaagtagaagatgatgagcgagttgcttatatacgagagcatttaatcgcttgccaccgcgcgattgaacaaggcgtcaatttaaaaggatattatgtatggtcgctgttcgataattttgagtgggcatttggatatgataagcgctttgggattgtatatgtggattatgaaacgctagagcgcatcccgaaaaagagtgcattatggtataaggaaacgattataaacaacggattgaaagcagaaaaagataaaagatctcatcaccatcaccatcactaa

SEQ ID NO: 75 - DNA, 1386 bp, Artificial Sequence
  Derived by Lab Evolution
atgcttcagtttccgaaagattttatttggggagctgcaacttcatcgtatcaaattgaaggaacagcgactggagaagataaaatttactcgatctgggatcacttttcccgcattcctggcaaaatagcgaatggggataatggcgatattgcaattgatcattataatcgttatgttgaagacatcgcattaatgaaagcgcttcatttgaaagcgtatcgattttcgactagttgggcgagactttattgtgaaacgccagggaagtttaacgaaaaaggtttagatttttataagcgtcttgtaaatgagctgctagagaacggtatcgagccaatgttgaccatttatcattgggatatgccacaagctcttcaagagaaaggtggctgggaaaatcgtgatatcgttcaatacttccaagaatacgctgctttcctttacgagaatcttggggatgtcgtgaaaaaatggattacgcataatgagccgtgggttgtcacctatttaggatatgggaatggcgaacatgccccagggattcaaaactttacatcatttttaaaagcagcacatcatgttcttctctcacacggggaagcggtaaaagcgtttcgagcaatcggtccgaaagatggggaaattggtattacgttgaatttgacacctggatatgcggttgatccgaaagatgaaaaagcagttgatgccgctcgaaaatgggacggctttatgaatcgttggtttttagatcctgtatttaagggacaatatccagcagatatgttagaagtgtataaagattatttaccagacgtttacaaagagggagatttacaaacgattcagcaaccgatcgactttttcggatttaactattatactacagcaacattaaaagattggaaaaaaggtgaccgtgaaccgatcgtatttgaacatgtgagcacaggaagacctgtgacggatatgaattgggaagtgaatccaaacggtttgtttgatttaatggtgcgattgaaaaaagattatggcgatattccattatacattaccgaaaacggtgctgcatacaaagatcgcgtcaacgaacaaggtgaagtagaagatgatgagcgagttgcttatatacgagagcatttaatcgcttgccaccgcgcgattgaacaaggcgtcaatttaaaaggatattatgtatggtcgctgttcgataattttgagtgggcatttggatatgataagcgctttgggattgtatacgtggattatgaaacgctagagcgcatcccgaaaaagagtgcattatggtataaggaaacgattataaacaacggattgaaagcagaaaaagataaaagatctcatcaccatcaccatcactaa

SEQ ID NO: 76 - DNA, 1386 bp, Artificial Sequence
  Derived by Lab Evolution
atgcttcagtttccgaaagattttatttggggagctgcaacttcatcgtatcaaattgaaggaacagcgactggagaagataaaatttactcgatctgggatcacttttcccgcattcctggcaaaatagcgaatggggataatggcgatattgcaattgatcattacaatcgttatgttgaagacatcgcattaatgaaagcgcttcatttgaaagcgttgcgattttcgactagttgggcgagactttattgtgaaacgccagggaagtttaacgaaaaaggtttagatttttataagcgtcttgtaaatgagctgctagagaacggtatcgagccaatgttgaccatttatcattgggatatgccacaagctcttcaagagaaaggtggctgggaaaatcgtgatatcgttcaatacttccaagaatacgctgctttcctttacgagaatcttggggatgtcgtgaaaaaatggattacgcataatgagccgtgggttgtcacctatttaggatatgggaatggcgaacatgccccagggattcaaaactttacatcatttttaaaagcagcacatcatgttcttctctcacacggggaagcggtaaaagcgtttcgagcaatcggtccgaaagatggggaaattggtattacgttgaatttgacacctggatatgcggttgatccgaaagatgaaaaagcagttgatgccgctcgaaaatgggacggctttatgaatcgttggtttttagatcctgtatttaagggacaatatccagcagatatgttagaagtgtataaagattatttaccagacgtttacaaagagggagatttacaaacgattcagcaaccgatcgactttttcggatttaactattattcaacagcaacattaaaagattggaaaaaaggtgaccgtgaaccgatcgtatttgaacatgtgagcacaggaagacctgtgacggatatgaattgggaagtgaatccaaacggtttgtttgatttaatggtgcgattgaaaaaagattatggcgatattccattatacattaccgaaaacggtgctgcatacaaagatcgcgtcaacgaacaaggtgaagtagaagatgatgagcgagttgcttatatacgagagcatttaatcgcttgccaccgcgcgattgaacaaggcgtcaatttaaaaggatattatgtatggtcgctgttcgataattttgagtgggcatttggatatgataagcgctttgggattgtatacgtggattatgaaacgctagagcgcatcccgaaaaagagtgcattatggtataaggaaacgattataaacaacggattgaaagcagaaaaagataaaagatctcatcaccatcaccatcactaa

SEQ ID NO: 77 - DNA, 1386 bp, Artificial Sequence
  Derived by Lab Evolution
atgcttcagtttccgaaacattttatttggggagctgcaacttcatcgtatcaaattgaaggaacagcgactggagaagataaaatttactcgatctgggatcacttttcccgcattcctggcaaaatagcgaatggggataatggcgatattgcaattgatcattacaatcgttatgttgaagacatcgcattaatgaaagcgcttcatttgaaagcgttgcgattttcgactagttgggcgagactttattgtgaaacgccagggaagtttaacgaaaaaggtttagatttttataagcgtcttgtaaatgagctgctagagaacggtatcgagccaatgttgaccatttatcattgggatatgccacaagctcttcaagagaaaggtggctgggaaaatcgtgatatcgttcaatacttccaagaatacgctgctttcctttacgagaatcttggggatgtcgtgaaaaaatggattacgcataatgagccgtgggttgtcacctatttaggatatgggaatggcgaacatgccccagggattcaaaactttacatcatttttaaaagcagcacatcatgttcttctctcacacggggaagcggtaaaagcgtttcgagcaatcggtccgaaagatggggaagttggtattgcgttgaatttgacacctggatatgcggttgatccgaaagatgaaaaagcagttgatgccgctcgaaaatgggacggctttcataatcgttggtttttagatcctgtatttaagggacaatatccagcagatatgttagaagtgtataaagattatttaccagacgtttacaaagagggagatttacaaacgattcagcaaccgatcgactttttcggagttaactattatactacagcaacattaaaagattggaaaaaaggtgaccgtgaaccgatcgtatttgaacatgtgagcacaggaagacctgtgacggatatgaattgggaagtgaatccaaacggtttgtttgatttaatggtgcgattgaaaaaagattatggcgatattccattatacattaccgaaaacggtgctgcatacaaagatcgcgtcaacgaacaaggtgaagtagaagatgatgagcgagttgcttatatacgagagcatttaatcgcttgccaccgcgcgattgaacaaggcgtcaatttaaaaggatattatgtatggtcgctgttcgataattttgagtgggcatttggatatgataagcgctttgggattgtatacgtggattatgaaacgctagagcgcatcccgaaaaagagtgcattatggtataaggaaacgattataaacaacggattgaaagcagaaaaagataaaagatctcatcaccatcaccatcactaa

SEQ ID NO: 78 - DNA, 1386 bp, Artificial Sequence
  Derived by Lab Evolution
atgcttcagtttccgaaacattttatttggggagctgcaacttcatcgtatcaaattgaaggaacagcgactggagaagataaaatttactcgatctgggatcacttttcccgcattcctggcaaaatagcgaatggggataatggcgatattgcaattgatcattacaatcgttatgttgaagacatcgcattaatgaaagcgcttcatttgaaagcgttgcgattttcgactagttgggcgagactttattgtgaaacgccagggaagtttaacgaaaaaggtttagatttttataagcgtcttgtaaatgagctgctagagaacggtatcgagccaatgttgaccatttatcattgggatatgccacaagctcttcaagagaaaggtggctgggaaaatcgtgatatcgttcaatacttccaagaatacgctgctttcctttacgagaatcttggggatgtcgtgaaaaaatggattacgcataatgagccgtgggttgtcacctatttaggatatgggaatggcgaacatgccccagggattcaaaactttacatcatttttaaaagcagcacatcatgttcttctctcacacggggaagcggtaaaagcgtttcgagcaatcggtccgaaagatggggaagttggtattgcgttgaatttgacacctggatatgcggttgatccgaaagatgaaaaagcagttgatgccgctcgaaaatgggacggctttaagaatcgttggtttttagatcctgtatttaagggacaatatccagcagatatgttagaagtgtataaagattatttaccagacgtttacaaagagggagatttacaaacgattcagcaaccgatcgactttttcggaattaactattatactacagcaacattaaaagattggaaaaaaggtgaccgtgaaccgatcgtatttgaacatgtgagcacaggaagacctgtgacggatatgaattgggaagtgaatccaaacggtttgtttgatttaatggtgcgattgaaaaaagattatggcgatattccattatacattaccgaaaacggtgctgcatacaaagatcgcgtcaacgaacaaggtgaagtagaagatgatgagcgagttgcttatatacgagagcatttaatcgcttgccaccgcgcgattgaacaaggcgtcaatttaaaaggatattatgtatggtcgctgttcgataattttgagtgggcatttggatatgataagcgctttgggattgtatacgtggattatgaaacgctagagcgcatcccgaaaaagagtgcattatggtataaggaaacgattataaacaacggattgaaagcagaaaaagataaaagatctcatcaccatcaccatcactaa

SEQ ID NO: 79 - DNA, 1386 bp, Artificial Sequence
  Derived by Lab Evolution
atgcttcagtttccgaaacattttatttggggagctgcaacttcatcgtatcaaattgaaggaacagcgactggagaagataaaatttactcgatctgggatcacttttcccgcattcctggcaaaatagcgaatggggataatggcgatattgcaattgatcattacaatcgttatgttgaagacatcgcattaatgaaagcgcttcatttgaaagcgttgcgattttcgactagttgggcgagactttattgtgaaacgccagggaagtttaacgaaaaaggtttagatttttataagcgtcttgtaaatgagctgctagagaacggtatcgagccaatgttgaccatttatcattgggatatgccacaagctcttcaagagaaaggtggctgggaaaatcgtgatatcgttcaatacttccaagaatacgctgctttcctttacgagaatcttggggatgtcgtgaaaaaatggattacgcataatgagccgtgggttgtcacctatttaggatatgggaatggcgaacatgccccagggattcaaaactttacatcatttttaaaagcagcacatcatgttcttctctcacacggggaagcggtaaaagcgtttcgagcaatcggtccgaaagatggggaagttggtattgcgttgaatttgacacctggatatgcggttgatccgaaagatgaaaaagcagttgatgccgctcgaaaatgggacggctttatgaatcgttggtttttagatcctgtatttaagggacaatatccagcagatatgttagaagtgtataaagattatttaccagacgtttacaaagagggagatttacaaacgattcagcaaccgatcgactttttcggaattaactattatactacagcaacattaaaagattggaaaaaaggtgaccgtgaaccgatcgtatttgaacatgtgagcacaggaagacctgtgacggatatgaattgggaagtgaatccaaacggtttgtttgatttaatggtgcgattgaaaaaagattatggcgatattccattatacattaccgaaaacggtgctgcatacaaagatcgcgtcaacgaacaaggtgaagtagaagatgatgagcgagttgcttatatacgagagcatttaatcgcttgccaccgcgcgattgaacaaggcgtcaatttaaaaggatattatgtatggtcgctgttcgataattttgagtgggcatttggatatgataagcgctttgggattgtatacgtggattatgaaacgctagagcgcatcccgaaaaagagtgcattatggtataaggaaacgattataaacaacggattgaaagcagaaaaagataaaagatctcatcaccatcaccatcactaa

SEQ ID NO: 80 - DNA, 1386 bp, Artificial Sequence
  Derived by Lab Evolution
atgcttcagtttccgaaacattttatttggggagctgcaacttcatcgtatcaaattgaaggaacagcgactggagaagataaaatttactcgatctgggatcacttttcccgcattcctggcaaaatagcgaatggggataatggcgatattgcaattgatcattacaatcgttatgttgaagacatcgcattaatgaaagcgcttcatttgaaagcgttgcgattttcgactagttgggcgagactttattgtgaaacgccagggaagtttaacgaaaaaggtttagatttttataagcgtcttgtaaatgagctgctagagaacggtatcgagccaatgttgaccatttatcattgggatatgccacaagctcttcaagagaaaggtggctgggaaaatcgtgatatcgttcaatacttccaagaatacgctgctttcctttacgagaatcttggggatgtcgtgaaaaaatggattacgcataatgagccgtgggttgtcacctatttaggatatgggaatggcgaacatgccccagggattcaaaactttacatcatttttaaaagcagcacatcatgttcttctctcacacggggaagcggtaaaagcgtttcgagcaatcggtccgaaagatggggaagttggtattgcgttgaatttgacacctggatatgcggttgatccgaaagatgaaaaagcagttgatgccgctcgaaaatgggacggctttatgaatcgttggtttttagatcctgtatttaagggacaatatccagcagatatgttagaagtgtataaagattatttaccagacgtttacaaagagggagatttacaaacgattcagcaaccgatcgactttttcggagttaactattatactacagcaacattaaaagattggaaaaaaggtgaccgtgaaccgatcgtatttgaacatgtgagcacaggaagacctgtgacggatatgaattgggaagtgaatccaaacggtttgtttgatttaatggtgcgattgaaaaaagattatggcgatattccattatacattaccgaaaacggtgctgcatacaaagatcgcgtcaacgaacaaggtgaagtagaagatgatgagcgagttgcttatatacgagagcatttaatcgcttgccaccgcgcgattgaacaaggcgtcaatttaaaaggatattatgtatggtcgctgttcgataattttgagtgggcatttggatatgataagcgctttgggattgtatacgtggattatgaaacgctagagcgcatcccgaaaaagagtgcattatggtataaggaaacgattataaacaacggattgaaagcagaaaaagataaaagatctcatcaccatcaccatcactaa

SEQ ID NO: 81 - DNA, 1386 bp, Artificial Sequence
  Derived by Lab Evolution
atgcttcagtttccgaaacattttatttggggagctgcaacttcatcgtatcaaattgaaggaacagcgactggagaagataaaatttactcgatctgggatcacttttcccgcattcctggcaaaatagcgaatggggataatggcgatattgcaattgatcattacaatcgttatgttgaagacatcgcattaatgaaagcgcttcatttgaaagcgttgcgattttcgactagttgggcgagactttattgtgaaacgccagggaagtttaacgaaaaaggtttagatttttataagcgtcttgtaaatgagctgctagagaacggtatcgagccaatgttgaccatttatcattgggatatgccacaagctcttcaagagaaaggtggctgggaaaatcgtgatatcgttcaatacttccaagaatacgctgctttcctttacgagaatcttggggatgtcgtgaaaaaatggattacgcataatgagccgtgggttgtcacctatttaggatatgggaatggcgaacatgccccagggattcaaaactttacatcatttttaaaagcagcacatcatgttcttctctcacacggggaagcggtaaaagcgtttcgagcaatcggtccgaaagatggggaagttggtattagtttgaatttgacacctggatatgcggttgatccgaaagatgaaaaagcagttgatgccgctcgaaaatgggacggctttaagaatcgttggtttttagatcctgtatttaagggacaatatccagcagatatgttagaagtgtataaagattatttaccagacgtttacaaagagggagatttacaaacgattcagcaaccgatcgactttttcggaattaactattatactacagcaacattaaaagattggaaaaaaggtgaccgtgaaccgatcgtatttgaacatgtgagcacaggaagacctgtgacggatatgaattgggaagtgaatccaaacggtttgtttgatttaatggtgcgattgaaaaaagattatggcgatattccattatacattaccgaaaacggtgctgcatacaaagatcgcgtcaacgaacaaggtgaagtagaagatgatgagcgagttgcttatatacgagagcatttaatcgcttgccaccgcgcgattgaacaaggcgtcaatttaaaaggatattattattggtcgctgttcgataattttgagtgggcatttggatatgataagcgctttgggattgtatacgtggattatgaaacgctagagcgcatcccgaaaaagagtgcattatggtataaggaaacgattataaacaacggattgaaagcagaaaaagataaaagatctcatcaccatcaccatcactaa

SEQ ID NO: 82 - DNA, 1386 bp, Artificial Sequence
  Derived by Lab Evolution
atgcttcagtttccgaaacattttatttggggagctgcaacttcatcgtatcaaattgaaggaacagcgactggagaagataaaatttactcgatctgggatcacttttcccgcattcctggcaaaatagcgaatggggataatggcgatattgcaattgatcattacaatcgttatgttgaagacatcgcattaatgaaagcgcttcatttgaaagcgttgcgattttcgactagttgggcgagactttattgtgaaacgccagggaagtttaacgaaaaaggtttagatttttataagcgtcttgtaaatgagctgctagagaacggtatcgagccaatgttgaccatttatcattgggatatgccacaagctcttcaagagaaaggtggctgggaaaatcgtgatatcgttcaatacttccaagaatacgctgctttcctttacgagaatcttggggatgtcgtgaaaaaatggattacgcataatgagccgtgggttgtcacctatttaggatatgggaatggcgaacatgccccagggattcaaaactttacatcatttttaaaagcagcacatcatgttcttctctcacacggggaagcggtaaaagcgtttcgagcaatcggtccgaaagatggggaagttggtattagtttgaatttgacacctggatatgcggttgatccgaaagatgaaaaagcagttgatgccgctcgaaaatgggacggctttatgaatcgttggtttttagatcctgtatttaagggacaatatccagcagatatgttagaagtgtataaagattatttaccagacgtttacaaagagggagatttacaaacgattcagcaaccgatcgactttttcggaattaactattatactacagcaacattaaaagattggaaaaaaggtgaccgtgaaccgatcgtatttgaacatgtgagcacaggaagacctgtgacggatatgaattgggaagtgaatccaaacggtttgtttgatttaatggtgcgattgaaaaaagattatggcgatattccattatacattaccgaaaacggtgctgcatacaaagatcgcgtcaacgaacaaggtgaagtagaagatgatgagcgagttgcttatatacgagagcatttaatcgcttgccaccgcgcgattgaacaaggcgtcaatttaaaaggatattattattggtcgctgttcgataattttgagtgggcatttggatatgataagcgctttgggattgtatacgtggattatgaaacgctagagcgcatcccgaaaaagagtgcattatggtataaggaaacgattataaacaacggattgaaagcagaaaaagataaaagatctcatcaccatcaccatcactaa

SEQ ID NO: 83 - DNA, 1386 bp, Artificial Sequence
  Derived by Lab Evolution
atgcttcagtttccgaaacattttatttggggagctgcaacttcatcgtatcaaattgaaggaacagcgactggagaagataaaatttactcgatctgggatcacttttcccgcattcctggcaaaatagcgaatggggataatggcgatattgcaattgatcattacaatcgttatgttgaagacatcgcattaatgaaagcgcttcatttgaaagcgttgcgattttcgactagttgggcgagactttattgtgaaacgccagggaagtttaacgaaaaaggtttagatttttataagcgtcttgtaaatgagctgctagagaacggtatcgagccaatgttgaccatttatcattgggatatgccacaagctcttcaagagaaaggtggctgggaaaatcgtgatatcgttcaatacttccaagaatacgctgctttcctttacgagaatcttggggatgtcgtgaaaaaatggattacgcataatgagccgtgggttgtcacctatttaggatatgggaatggcgaacatgccccagggattcaaaactttacatcatttttaaaagcagcacatcatgttcttctctcacacggggaagcggtaaaagcgtttcgagcaatcggtccgaaagatggggaagttggtattagtttgaatttgacacctggatatgcggttgatccgaaagatgaaaaagcagttgatgccgctcgaaaatgggacggctttatgaatcgttggtttttagatcctgtatttaagggacaatatccagcagatatgttagaagtgtataaagattatttaccagacgtttacaaagagggagatttacaaacgattcagcaaccgatcgactttttcggagttaactattatactacagcaacattaaaagattggaaaaaaggtgaccgtgaaccgatcgtatttgaacatgtgagcacaggaagacctgtgacggatatgaattgggaagtgaatccaaacggtttgtttgatttaatggtgcgattgaaaaaagattatggcgatattccattatacattaccgaaaacggtgctgcatacaaagatcgcgtcaacgaacaaggtgaagtagaagatgatgagcgagttgcttatatacgagagcatttaatcgcttgccaccgcgcgattgaacaaggcgtcaatttaaaaggatattattattggtcgctgttcgataattttgagtgggcatttggatatgataagcgctttgggattgtatacgtggattatgaaacgctagagcgcatcccgaaaaagagtgcattatggtataaggaaacgattataaacaacggattgaaagcagaaaaagataaaagatctcatcaccatcaccatcactaa

SEQ ID NO: 84 - DNA, 1386 bp, Artificial Sequence
  Derived by Lab Evolution
atgcttcagtttccgaaacattttatttggggagctgcaacttcatcgtatcaaattgaaggaacagcgactggagaagataaaatttactcgatctgggatcacttttcccgcattcctggcaaaatagcgaatggggataatggcgatattgcaattgatcattacaatcgttatgttgaagacatcgcattaatgaaagcgcttcatttgaaagcgttgcgattttcgactagttgggcgagactttattgtgaaacgccagggaagtttaacgaaaaaggtttagatttttataagcgtcttgtaaatgagctgctagagaacggtatcgagccaatgttgaccatttatcattgggatatgccacaagctcttcaagagaaaggtggctgggaaaatcgtgatatcgttcaatacttccaagaatacgctgctttcctttacgagaatcttggggatgtcgtgaaaaaatggattacgcataatgagccgtgggttgtcacctatttaggatatgggaatggcgaacatgccccagggattcaaaactttacatcatttttaaaagcagcacatcatgttcttctctcacacggggaagcggtaaaagcgtttcgagcaatcggtccgaaagatggggaagttggtattacgttgaatttgacacctggatatgcggttgatccgaaagatgaaaaagcagttgatgccgctcgaaaatgggacggctttaagaatcgttggtttttagatcctgtatttaagggacaatatccagcagatatgttagaagtgtataaagattatttaccagacgtttacaaagagggagatttacaaacgattcagcaaccgatcgactttttcggagttaactattatactacagcaacattaaaagattggaaaaaaggtgaccgtgaaccgatcgtatttgaacatgtgagcacaggaagacctgtgacggatatgaattgggaagtgaatccaaacggtttgtttgatttaatggtgcgattgaaaaaagattatggcgatattccattatacattaccgaaaacggtgctgcatacaaagatcgcgtcaacgaacaaggtgaagtagaagatgatgagcgagttgcttatatacgagagcatttaatcgcttgccaccgcgcgattgaacaaggcgtcaatttaaaaggatattattattggtcgctgttcgataattttgagtgggcatttggatatgataagcgctttgggattgtatacgtggattatgaaacgctagagcgcatcccgaaaaagagtgcattatggtataaggaaacgattataaacaacggattgaaagcagaaaaagataaaagatctcatcaccatcaccatcactaa

SEQ ID NO: 85 - DNA, 1386 bp, Artificial Sequence
  Derived by Lab Evolution
atgcttcagtttccgaaacattttatttggggagctgcaacttcatcgtatcaaattgaaggaacagcgactggagaagataaaatttactcgatctgggatcacttttcccgcattcctggcaaaatagcgaatggggataatggcgatattgcaattgatcattacaatcgttatgttgaagacatcgcattaatgaaagcgcttcatttgaaagcgttgcgattttcgactagttgggcgagactttattgtgaaacgccagggaagtttaacgaaaaaggtttagatttttataagcgtcttgtaaatgagctgctagagaacggtatcgagccaatgttgaccatttatcattgggatatgccacaagctcttcaagagaaaggtggctgggaaaatcgtgatatcgttcaatacttccaagaatacgctgctttcctttacgagaatcttggggatgtcgtgaaaaaatggattacgcataatgagccgtgggttgtcacctatttaggatatgggaatggcgaacatgccccagggattcaaaactttacatcatttttaaaagcagcacatcatgttcttctctcacacggggaagcggtaaaagcgtttcgagcaatcggtccgaaagatggggaaattggtattgcgttgaatttgacacctggatatgcggttgatccgaaagatgaaaaagcagttgatgccgctcgaaaatgggacggctttaagaatcgttggtttttagatcctgtatttaagggacaatatccagcagatatgttagaagtgtataaagattatttaccagacgtttacaaagagggagatttacaaacgattcagcaaccgatcgactttttcggaattaactattatactacagcaacattaaaagattggaaaaaaggtgaccgtgaaccgatcgtatttgaacatgtgagcacaggaagacctgtgacggatatgaattgggaagtgaatccaaacggtttgtttgatttaatggtgcgattgaaaaaagattatggcgatattccattatacattaccgaaaacggtgctgcatacaaagatcgcgtcaacgaacaaggtgaagtagaagatgatgagcgagttgcttatatacgagagcatttaatcgcttgccaccgcgcgattgaacaaggcgtcaatttaaaaggatattatgtatggtcgctgttcgataattttgagtgggcatttggatatgataagcgctttgggattgtatacgtggattatgaaacgctagagcgcatcccgaaaaagagtgcattatggtataaggaaacgattataaacaacggattgaaagcagaaaaagataaaagatctcatcaccatcaccatcactaa

SEQ ID NO: 86 - DNA, 1386 bp, Artificial Sequence
  Derived by Lab Evolution
atgcttcagtttccgaaacattttatttggggagctgcaacttcatcgtatcaaattgaaggaacagcgactggagaagataaaatttactcgatctgggatcacttttcccgcattcctggcaaaatagcgaatggggataatggcgatattgcaattgatcattacaatcgttatgttgaagacatcgcattaatgaaagcgcttcatttgaaagcgttgcgattttcgactagttgggcgagactttattgtgaaacgccagggaagtttaacgaaaaaggtttagatttttataagcgtcttgtaaatgagctgctagagaacggtatcgagccaatgttgaccatttatcattgggatatgccacaagctcttcaagagaaaggtggctgggaaaatcgtgatatcgttcaatacttccaagaatacgctgctttcctttacgagaatcttggggatgtcgtgaaaaaatggattacgcataatgagccgtgggttgtcacctatttaggatatgggaatggcgaacatgccccagggattcaaaactttacatcatttttaaaagcagcacatcatgttcttctctcacacggggaagcggtaaaagcgtttcgagcaatcggtccgaaagatggggaaattggtattagtttgaatttgacacctggatatgcggttgatccgaaagatgaaaaagcagttgatgccgctcgaaaatgggacggctttaagaatcgttggtttttagatcctgtatttaagggacaatatccagcagatatgttagaagtgtataaagattatttaccagacgtttacaaagagggagatttacaaacgattcagcaaccgatcgactttttcggaattaactattatactacagcaacattaaaagattggaaaaaaggtgaccgtgaaccgatcgtatttgaacatgtgagcacaggaagacctgtgacggatatgaattgggaagtgaatccaaacggtttgtttgatttaatggtgcgattgaaaaaagattatggcgatattccattatacattaccgaaaacggtgctgcatacaaagatcgcgtcaacgaacaaggtgaagtagaagatgatgagcgagttgcttatatacgagagcatttaatcgcttgccaccgcgcgattgaacaaggcgtcaatttaaaaggatattatgtatggtcgctgttcgataattttgagtgggcatttggatatgataagcgctttgggattgtatacgtggattatgaaacgctagagcgcatcccgaaaaagagtgcattatggtataaggaaacgattataaacaacggattgaaagcagaaaaagataaaagatctcatcaccatcaccatcactaa

SEQ ID NO: 87 - DNA, 1386 bp, Artificial Sequence
  Derived by Lab Evolution
atgcttcagtttccgaaacattttatttggggagctgcaacttcatcgtatcaaattgaaggaacagcgactggagaagataaaatttactcgatctgggatcacttttcccgcattcctggcaaaatagcgaatggggataatggcgatattgcaattgatcattacaatcgttatgttgaagacatcgcattaatgaaagcgcttcatttgaaagcgttgcgattttcgactagttgggcgagactttattgtgaaacgccagggaagtttaacgaaaaaggtttagatttttataagcgtcttgtaaatgagctgctagagaacggtatcgagccaatgttgaccatttatcattgggatatgccacaagctcttcaagagaaaggtggctgggaaaatcgtgatatcgttcaatacttccaagaatacgctgctttcctttacgagaatcttggggatgtcgtgaaaaaatggattacgcataatgagccgtgggttgtcacctatttaggatatgggaatggcgaacatgccccagggattcaaaactttacatcatttttaaaagcagcacatcatgttcttctctcacacggggaagcggtaaaagcgtttcgagcaatcggtccgaaagatggggaaattggtattagtttgaatttgacacctggatatgcggttgatccgaaagatgaaaaagcagttgatgccgctcgaaaatgggacggctttaagaatcgttggtttttagatcctgtatttaagggacaatatccagcagatatgttagaagtgtataaagattatttaccagacgtttacaaagagggagatttacaaacgattcagcaaccgatcgactttttcggagttaactattatactacagcaacattaaaagattggaaaaaaggtgaccgtgaaccgatcgtatttgaacatgtgagcacaggaagacctgtgacggatatgaattgggaagtgaatccaaacggtttgtttgatttaatggtgcgattgaaaaaagattatggcgatattccattatacattaccgaaaacggtgctgcatacaaagatcgcgtcaacgaacaaggtgaagtagaagatgatgagcgagttgcttatatacgagagcatttaatcgcttgccaccgcgcgattgaacaaggcgtcaatttaaaaggatattatgtatggtcgctgttcgataattttgagtgggcatttggatatgataagcgctttgggattgtatacgtggattatgaaacgctagagcgcatcccgaaaaagagtgcattatggtataaggaaacgattataaacaacggattgaaagcagaaaaagataaaagatctcatcaccatcaccatcactaa

SEQ ID NO: 88 - DNA, 1386 bp, Artificial Sequence
  Derived by Lab Evolution
atgcttcagtttccgaaacattttatttggggagctgcaacttcatcgtatcaaattgaaggaacagcgactggagaagataaaatttactcgatctgggatcacttttcccgcattcctggcaaaatagcgaatggggataatggcgatattgcaattgatcattacaatcgttatgttgaagacatcgcattaatgaaagcgcttcatttgaaagcgttgcgattttcgactagttgggcgagactttattgtgaaacgccagggaagtttaacgaaaaaggtttagatttttataagcgtcttgtaaatgagctgctagagaacggtatcgagccaatgttgaccatttatcattgggatatgccacaagctcttcaagagaaaggtggctgggaaaatcgtgatatcgttcaatacttccaagaatacgctgctttcctttacgagaatcttggggatgtcgtgaaaaaatggattacgcataatgagccgtgggttgtcacctatttaggatatgggaatggcgaacatgccccagggattcaaaactttacatcatttttaaaagcagcacatcatgttcttctctcacacggggaagcggtaaaagcgtttcgagcaatcggtccgaaagatggggaaattggtattacgttgaatttgacacctggatatgcggttgatccgaaagatgaaaaagcagttgatgccgctcgaaaatgggacggctttcataatcgttggtttttagatcctgtatttaagggacaatatccagcagatatgttagaagtgtataaagattatttaccagacgtttacaaagagggagatttacaaacgattcagcaaccgatcgactttttcggagttaactattatactacagcaacattaaaagattggaaaaaaggtgaccgtgaaccgatcgtatttgaacatgtgagcacaggaagacctgtgacggatatgaattgggaagtgaatccaaacggtttgtttgatttaatggtgcgattgaaaaaagattatggcgatattccattatacattaccgaaaacggtgctgcatacaaagatcgcgtcaacgaacaaggtgaagtagaagatgatgagcgagttgcttatatacgagagcatttaatcgcttgccaccgcgcgattgaacaaggcgtcaatttaaaaggatatttttattggtcgctgttcgataattttgagtgggcatttggatatgataagcgctttgggattgtatacgtggattatgaaacgctagagcgcatcccgaaaaagagtgcattatggtataaggaaacgattataaacaacggattgaaagcagaaaaagataaaagatctcatcaccatcaccatcactaa

SEQ ID NO: 89 - DNA, 1386 bp, Artificial Sequence
  Derived by Lab Evolution
atgcttcagtttccgaaacattttatttggggagctgcaacttcatcgtatcaaattgaaggaacagcgactggagaagataaaatttactcgatctgggatcacttttcccgcattcctggcaaaatagcgaatggggataatggcgatattgcaattgatcattacaatcgttatgttgaagacatcgcattaatgaaagcgcttcatttgaaagcgtatcgattttcgactagttgggcgagactttattgtgaaacgccagggaagtttaacgaaaaaggtttagatttttataagcgtcttgtaaatgagctgctagagaacggtatcgagccaatgttgaccatttatcattgggatatgccacaagctcttcaagagaaaggtggctgggaaaatcgtgatatcgttcaatacttccaagaatacgctgctttcctttacgagaatcttggggatgtcgtgaaaaaatggattacgcataatgagccgtgggttgtcacctatttaggatatgggaatggcgaacatgccccagggattcaaaactttacatcatttttaaaagcagcacatcatgttcttctctcacacggggaagcggtaaaagcgtttcgagcaatcggtccgaaagatggggaagttggtattgcgttgaatttgacacctggatatgcggttgatccgaaagatgaaaaagcagttgatgccgctcgaaaatgggacggctttcataatcgttggtttttagatcctgtatttaagggacaatatccagcagatatgttagaagtgtataaagattatttaccagacgtttacaaagagggagatttacaaacgattcagcaaccgatcgactttttcggagttaactattatactacagcaacattaaaagattggaaaaaaggtgaccgtgaaccgatcgtatttgaacatgtgagcacaggaagacctgtgacggatatgaattgggaagtgaatccaaacggtttgtttgatttaatggtgcgattgaaaaaagattatggcgatattccattatacattaccgaaaacggtgctgcatacaaagatcgcgtcaacgaacaaggtgaagtagaagatgatgagcgagttgcttatatacgagagcatttaatcgcttgccaccgcgcgattgaacaaggcgtcaatttaaaaggatattatgtatggtcgctgttcgataattttgagtgggcatttggatatgataagcgctttgggattgtatacgtggattatgaaacgctagagcgcatcccgaaaaagagtgcattatggtataaggaaacgattataaacaacggattgaaagcagaaaaagataaaagatctcatcaccatcaccatcactaa

SEQ ID NO: 90 - DNA, 1386 bp, Artificial Sequence
  Derived by Lab Evolution
atgcttcagtttccgaaacattttatttggggagctgcaacttcatcgtatcaaattgaaggaacagcgactggagaagataaaatttactcgatctgggatcacttttcccgcattcctggcaaaatagcgaatggggataatggcgatattgcaattgatcattacaatcgttatgttgaagacatcgcattaatgaaagcgcttcatttgaaagcgtatcgattttcgactagttgggcgagactttattgtgaaacgccagggaagtttaacgaaaaaggtttagatttttataagcgtcttgtaaatgagctgctagagaacggtatcgagccaatgttgaccatttatcattgggatatgccacaagctcttcaagagaaaggtggctgggaaaatcgtgatatcgttcaatacttccaagaatacgctgctttcctttacgagaatcttggggatgtcgtgaaaaaatggattacgcataatgagccgtgggttgtcacctatttaggatatgggaatggcgaacatgccccagggattcaaaactttacatcatttttaaaagcagcacatcatgttcttctctcacacggggaagcggtaaaagcgtttcgagcaatcggtccgaaagatggggaagttggtattgcgttgaatttgacacctggatatgcggttgatccgaaagatgaaaaagcagttgatgccgctcgaaaatgggacggctttcataatcgttggtttttagatcctgtatttaagggacaatatccagcagatatgttagaagtgtataaagattatttaccagacgtttacaaagagggagatttacaaacgattcagcaaccgatcgactttttcggatttaactattatactacagcaacattaaaagattggaaaaaaggtgaccgtgaaccgatcgtatttgaacatgtgagcacaggaagacctgtgacggatatgaattgggaagtgaatccaaacggtttgtttgatttaatggtgcgattgaaaaaagattatggcgatattccattatacattaccgaaaacggtgctgcatacaaagatcgcgtcaacgaacaaggtgaagtagaagatgatgagcgagttgcttatatacgagagcatttaatcgcttgccaccgcgcgattgaacaaggcgtcaatttaaaaggatatttttattggtcgctgttcgataattttgagtgggcatttggatatgataagcgctttgggattgtatacgtggattatgaaacgctagagcgcatcccgaaaaagagtgcattatggtataaggaaacgattataaacaacggattgaaagcagaaaaagataaaagatctcatcaccatcaccatcactaa

SEQ ID NO: 91 - DNA, 1386 bp, Artificial Sequence
  Derived by Lab Evolution
atgcttcagtttccgaaacattttatttggggagctgcaacttcatcgtatcaaattgaaggaacagcgactggagaagataaaatttactcgatctgggatcacttttcccgcattcctggcaaaatagcgaatggggataatggcgatattgcaattgatcattacaatcgttatgttgaagacatcgcattaatgaaagcgcttcatttgaaagcgtatcgattttcgactagttgggcgagactttattgtgaaacgccagggaagtttaacgaaaaaggtttagatttttataagcgtcttgtaaatgagctgctagagaacggtatcgagccaatgttgaccatttatcattgggatatgccacaagctcttcaagagaaaggtggctgggaaaatcgtgatatcgttcaatacttccaagaatacgctgctttcctttacgagaatcttggggatgtcgtgaaaaaatggattacgcataatgagccgtgggttgtcacctatttaggatatgggaatggcgaacatgccccagggattcaaaactttacatcatttttaaaagcagcacatcatgttcttctctcacacggggaagcggtaaaagcgtttcgagcaatcggtccgaaagatggggaagttggtattgcgttgaatttgacacctggatatgcggttgatccgaaagatgaaaaagcagttgatgccgctcgaaaatgggacggctttaagaatcgttggtttttagatcctgtatttaagggacaatatccagcagatatgttagaagtgtataaagattatttaccagacgtttacaaagagggagatttacaaacgattcagcaaccgatcgactttttcggaattaactattatactacagcaacattaaaagattggaaaaaaggtgaccgtgaaccgatcgtatttgaacatgtgagcacaggaagacctgtgacggatatgaattgggaagtgaatccaaacggtttgtttgatttaatggtgcgattgaaaaaagattatggcgatattccattatacattaccgaaaacggtgctgcatacaaagatcgcgtcaacgaacaaggtgaagtagaagatgatgagcgagttgcttatatacgagagcatttaatcgcttgccaccgcgcgattgaacaaggcgtcaatttaaaaggatatttttattggtcgctgttcgataattttgagtgggcatttggatatgataagcgctttgggattgtatacgtggattatgaaacgctagagcgcatcccgaaaaagagtgcattatggtataaggaaacgattataaacaacggattgaaagcagaaaaagataaaagatctcatcaccatcaccatcactaa

SEQ ID NO: 92 - DNA, 1386 bp, Artificial Sequence
  Derived by Lab Evolution
atgcttcagtttccgaaacattttatttggggagctgcaacttcatcgtatcaaattgaaggaacagcgactggagaagataaaatttactcgatctgggatcacttttcccgcattcctggcaaaatagcgaatggggataatggcgatattgcaattgatcattacaatcgttatgttgaagacatcgcattaatgaaagcgcttcatttgaaagcgtatcgattttcgactagttgggcgagactttattgtgaaacgccagggaagtttaacgaaaaaggtttagatttttataagcgtcttgtaaatgagctgctagagaacggtatcgagccaatgttgaccatttatcattgggatatgccacaagctcttcaagagaaaggtggctgggaaaatcgtgatatcgttcaatacttccaagaatacgctgctttcctttacgagaatcttggggatgtcgtgaaaaaatggattacgcataatgagccgtgggttgtcacctatttaggatatgggaatggcgaacatgccccagggattcaaaactttacatcatttttaaaagcagcacatcatgttcttctctcacacggggaagcggtaaaagcgtttcgagcaatcggtccgaaagatggggaagttggtattgcgttgaatttgacacctggatatgcggttgatccgaaagatgaaaaagcagttgatgccgctcgaaaatgggacggctttaagaatcgttggtttttagatcctgtatttaagggacaatatccagcagatatgttagaagtgtataaagattatttaccagacgtttacaaagagggagatttacaaacgattcagcaaccgatcgactttttcggaattaactattatactacagcaacattaaaagattggaaaaaaggtgaccgtgaaccgatcgtatttgaacatgtgagcacaggaagacctgtgacggatatgaattgggaagtgaatccaaacggtttgtttgatttaatggtgcgattgaaaaaagattatggcgatattccattatacattaccgaaaacggtgctgcatacaaagatcgcgtcaacgaacaaggtgaagtagaagatgatgagcgagttgcttatatacgagagcatttaatcgcttgccaccgcgcgattgaacaaggcgtcaatttaaaaggatattatgtatggtcgctgttcgataattttgagtgggcatttggatatgataagcgctttgggattgtatacgtggattatgaaacgctagagcgcatcccgaaaaagagtgcattatggtataaggaaacgattataaacaacggattgaaagcagaaaaagataaaagatctcatcaccatcaccatcactaa

SEQ ID NO: 93 - DNA, 1386 bp, Artificial Sequence
  Derived by Lab Evolution
atgcttcagtttccgaaacattttatttggggagctgcaacttcatcgtatcaaattgaaggaacagcgactggagaagataaaatttactcgatctgggatcacttttcccgcattcctggcaaaatagcgaatggggataatggcgatattgcaattgatcattacaatcgttatgttgaagacatcgcattaatgaaagcgcttcatttgaaagcgtatcgattttcgactagttgggcgagactttattgtgaaacgccagggaagtttaacgaaaaaggtttagatttttataagcgtcttgtaaatgagctgctagagaacggtatcgagccaatgttgaccatttatcattgggatatgccacaagctcttcaagagaaaggtggctgggaaaatcgtgatatcgttcaatacttccaagaatacgctgctttcctttacgagaatcttggggatgtcgtgaaaaaatggattacgcataatgagccgtgggttgtcacctatttaggatatgggaatggcgaacatgccccagggattcaaaactttacatcatttttaaaagcagcacatcatgttcttctctcacacggggaagcggtaaaagcgtttcgagcaatcggtccgaaagatggggaagttggtattgcgttgaatttgacacctggatatgcggttgatccgaaagatgaaaaagcagttgatgccgctcgaaaatgggacggctttaagaatcgttggtttttagatcctgtatttaagggacaatatccagcagatatgttagaagtgtataaagattatttaccagacgtttacaaagagggagatttacaaacgattcagcaaccgatcgactttttcggatttaactattatactacagcaacattaaaagattggaaaaaaggtgaccgtgaaccgatcgtatttgaacatgtgagcacaggaagacctgtgacggatatgaattgggaagtgaatccaaacggtttgtttgatttaatggtgcgattgaaaaaagattatggcgatattccattatacattaccgaaaacggtgctgcatacaaagatcgcgtcaacgaacaaggtgaagtagaagatgatgagcgagttgcttatatacgagagcatttaatcgcttgccaccgcgcgattgaacaaggcgtcaatttaaaaggatattatgtattttcgctgttcgataattttgagtgggcatttggatatgataagcgctttgggattgtatacgtggattatgaaacgctagagcgcatcccgaaaaagagtgcattatggtataaggaaacgattataaacaacggattgaaagcagaaaaagataaaagatctcatcaccatcaccatcactaa

SEQ ID NO: 94 - DNA, 1386 bp, Artificial Sequence
  Derived by Lab Evolution
atgcttcagtttccgaaacattttatttggggagctgcaacttcatcgtatcaaattgaaggaacagcgactggagaagataaaatttactcgatctgggatcacttttcccgcattcctggcaaaatagcgaatggggataatggcgatattgcaattgatcattacaatcgttatgttgaagacatcgcattaatgaaagcgcttcatttgaaagcgtatcgattttcgactagttgggcgagactttattgtgaaacgccagggaagtttaacgaaaaaggtttagatttttataagcgtcttgtaaatgagctgctagagaacggtatcgagccaatgttgaccatttatcattgggatatgccacaagctcttcaagagaaaggtggctgggaaaatcgtgatatcgttcaatacttccaagaatacgctgctttcctttacgagaatcttggggatgtcgtgaaaaaatggattacgcataatgagccgtgggttgtcacctatttaggatatgggaatggcgaacatgccccagggattcaaaactttacatcatttttaaaagcagcacatcatgttcttctctcacacggggaagcggtaaaagcgtttcgagcaatcggtccgaaagatggggaagttggtattgcgttgaatttgacacctggatatgcggttgatccgaaagatgaaaaagcagttgatgccgctcgaaaatgggacggctttatgaatcgttggtttttagatcctgtatttaagggacaatatccagcagatatgttagaagtgtataaagattatttaccagacgtttacaaagagggagatttacaaacgattcagcaaccgatcgactttttcggagttaactattatactacagcaacattaaaagattggaaaaaaggtgaccgtgaaccgatcgtatttgaacatgtgagcacaggaagacctgtgacggatatgaattgggaagtgaatccaaacggtttgtttgatttaatggtgcgattgaaaaaagattatggcgatattccattatacattaccgaaaacggtgctgcatacaaagatcgcgtcaacgaacaaggtgaagtagaagatgatgagcgagttgcttatatacgagagcatttaatcgcttgccaccgcgcgattgaacaaggcgtcaatttaaaaggatattttgtattttcgctgttcgataattttgagtgggcatttggatatgataagcgctttgggattgtatacgtggattatgaaacgctagagcgcatcccgaaaaagagtgcattatggtataaggaaacgattataaacaacggattgaaagcagaaaaagataaaagatctcatcaccatcaccatcactaa

SEQ ID NO: 95 - DNA, 1386 bp, Artificial Sequence
  Derived by Lab Evolution
atgcttcagtttccgaaacattttatttggggagctgcaacttcatcgtatcaaattgaaggaacagcgactggagaagataaaatttactcgatctgggatcacttttcccgcattcctggcaaaatagcgaatggggataatggcgatattgcaattgatcattacaatcgttatgttgaagacatcgcattaatgaaagcgcttcatttgaaagcgtatcgattttcgactagttgggcgagactttattgtgaaacgccagggaagtttaacgaaaaaggtttagatttttataagcgtcttgtaaatgagctgctagagaacggtatcgagccaatgttgaccatttatcattgggatatgccacaagctcttcaagagaaaggtggctgggaaaatcgtgatatcgttcaatacttccaagaatacgctgctttcctttacgagaatcttggggatgtcgtgaaaaaatggattacgcataatgagccgtgggttgtcacctatttaggatatgggaatggcgaacatgccccagggattcaaaactttacatcatttttaaaagcagcacatcatgttcttctctcacacggggaagcggtaaaagcgtttcgagcaatcggtccgaaagatggggaagttggtattgcgttgaatttgacacctggatatgcggttgatccgaaagatgaaaaagcagttgatgccgctcgaaaatgggacggctttatgaatcgttggtttttagatcctgtatttaagggacaatatccagcagatatgttagaagtgtataaagattatttaccagacgtttacaaagagggagatttacaaacgattcagcaaccgatcgactttttcggagttaactattatactacagcaacattaaaagattggaaaaaaggtgaccgtgaaccgatcgtatttgaacatgtgagcacaggaagacctgtgacggatatgaattgggaagtgaatccaaacggtttgtttgatttaatggtgcgattgaaaaaagattatggcgatattccattatacattaccgaaaacggtgctgcatacaaagatcgcgtcaacgaacaaggtgaagtagaagatgatgagcgagttgcttatatacgagagcatttaatcgcttgccaccgcgcgattgaacaaggcgtcaatttaaaaggatattatgtattttcgctgttcgataattttgagtgggcatttggatatgataagcgctttgggattgtatacgtggattatgaaacgctagagcgcatcccgaaaaagagtgcattatggtataaggaaacgattataaacaacggattgaaagcagaaaaagataaaagatctcatcaccatcaccatcactaa

SEQ ID NO: 96 - DNA, 1386 bp, Artificial Sequence
  Derived by Lab Evolution
atgcttcagtttccgaaacattttatttggggagctgcaacttcatcgtatcaaattgaaggaacagcgactggagaagataaaatttactcgatctgggatcacttttcccgcattcctggcaaaatagcgaatggggataatggcgatattgcaattgatcattacaatcgttatgttgaagacatcgcattaatgaaagcgcttcatttgaaagcgtatcgattttcgactagttgggcgagactttattgtgaaacgccagggaagtttaacgaaaaaggtttagatttttataagcgtcttgtaaatgagctgctagagaacggtatcgagccaatgttgaccatttatcattgggatatgccacaagctcttcaagagaaaggtggctgggaaaatcgtgatatcgttcaatacttccaagaatacgctgctttcctttacgagaatcttggggatgtcgtgaaaaaatggattacgcataatgagccgtgggttgtcacctatttaggatatgggaatggcgaacatgccccagggattcaaaactttacatcatttttaaaagcagcacatcatgttcttctctcacacggggaagcggtaaaagcgtttcgagcaatcggtccgaaagatggggaagttggtattagtttgaatttgacacctggatatgcggttgatccgaaagatgaaaaagcagttgatgccgctcgaaaatgggacggctttcataatcgttggtttttagatcctgtatttaagggacaatatccagcagatatgttagaagtgtataaagattatttaccagacgtttacaaagagggagatttacaaacgattcagcaaccgatcgactttttcggaattaactattatactacagcaacattaaaagattggaaaaaaggtgaccgtgaaccgatcgtatttgaacatgtgagcacaggaagacctgtgacggatatgaattgggaagtgaatccaaacggtttgtttgatttaatggtgcgattgaaaaaagattatggcgatattccattatacattaccgaaaacggtgctgcatacaaagatcgcgtcaacgaacaaggtgaagtagaagatgatgagcgagttgcttatatacgagagcatttaatcgcttgccaccgcgcgattgaacaaggcgtcaatttaaaaggatattatgtattttcgctgttcgataattttgagtgggcatttggatatgataagcgctttgggattgtatacgtggattatgaaacgctagagcgcatcccgaaaaagagtgcattatggtataaggaaacgattataaacaacggattgaaagcagaaaaagataaaagatctcatcaccatcaccatcactaa

SEQ ID NO: 97 - DNA, 1386 bp, Artificial Sequence
  Derived by Lab Evolution
atgcttcagtttccgaaacattttatttggggagctgcaacttcatcgtatcaaattgaaggaacagcgactggagaagataaaatttactcgatctgggatcacttttcccgcattcctggcaaaatagcgaatggggataatggcgatattgcaattgatcattacaatcgttatgttgaagacatcgcattaatgaaagcgcttcatttgaaagcgtatcgattttcgactagttgggcgagactttattgtgaaacgccagggaagtttaacgaaaaaggtttagatttttataagcgtcttgtaaatgagctgctagagaacggtatcgagccaatgttgaccatttatcattgggatatgccacaagctcttcaagagaaaggtggctgggaaaatcgtgatatcgttcaatacttccaagaatacgctgctttcctttacgagaatcttggggatgtcgtgaaaaaatggattacgcataatgagccgtgggttgtcacctatttaggatatgggaatggcgaacatgccccagggattcaaaactttacatcatttttaaaagcagcacatcatgttcttctctcacacggggaagcggtaaaagcgtttcgagcaatcggtccgaaagatggggaagttggtattagtttgaatttgacacctggatatgcggttgatccgaaagatgaaaaagcagttgatgccgctcgaaaatgggacggctttcataatcgttggtttttagatcctgtatttaagggacaatatccagcagatatgttagaagtgtataaagattatttaccagacgtttacaaagagggagatttacaaacgattcagcaaccgatcgactttttcggaattaactattatactacagcaacattaaaagattggaaaaaaggtgaccgtgaaccgatcgtatttgaacatgtgagcacaggaagacctgtgacggatatgaattgggaagtgaatccaaacggtttgtttgatttaatggtgcgattgaaaaaagattatggcgatattccattatacattaccgaaaacggtgctgcatacaaagatcgcgtcaacgaacaaggtgaagtagaagatgatgagcgagttgcttatatacgagagcatttaatcgcttgccaccgcgcgattgaacaaggcgtcaatttaaaaggatattattattggtcgctgttcgataattttgagtgggcatttggatatgataagcgctttgggattgtatacgtggattatgaaacgctagagcgcatcccgaaaaagagtgcattatggtataaggaaacgattataaacaacggattgaaagcagaaaaagataaaagatctcatcaccatcaccatcactaa

SEQ ID NO: 98 - DNA, 1386 bp, Artificial Sequence
  Derived by Lab Evolution
atgcttcagtttccgaaacattttatttggggagctgcaacttcatcgtatcaaattgaaggaacagcgactggagaagataaaatttactcgatctgggatcacttttcccgcattcctggcaaaatagcgaatggggataatggcgatattgcaattgatcattacaatcgttatgttgaagacatcgcattaatgaaagcgcttcatttgaaagcgtatcgattttcgactagttgggcgagactttattgtgaaacgccagggaagtttaacgaaaaaggtttagatttttataagcgtcttgtaaatgagctgctagagaacggtatcgagccaatgttgaccatttatcattgggatatgccacaagctcttcaagagaaaggtggctgggaaaatcgtgatatcgttcaatacttccaagaatacgctgctttcctttacgagaatcttggggatgtcgtgaaaaaatggattacgcataatgagccgtgggttgtcacctatttaggatatgggaatggcgaacatgccccagggattcaaaactttacatcatttttaaaagcagcacatcatgttcttctctcacacggggaagcggtaaaagcgtttcgagcaatcggtccgaaagatggggaagttggtattagtttgaatttgacacctggatatgcggttgatccgaaagatgaaaaagcagttgatgccgctcgaaaatgggacggctttcataatcgttggtttttagatcctgtatttaagggacaatatccagcagatatgttagaagtgtataaagattatttaccagacgtttacaaagagggagatttacaaacgattcagcaaccgatcgactttttcggagttaactattatactacagcaacattaaaagattggaaaaaaggtgaccgtgaaccgatcgtatttgaacatgtgagcacaggaagacctgtgacggatatgaattgggaagtgaatccaaacggtttgtttgatttaatggtgcgattgaaaaaagattatggcgatattccattatacattaccgaaaacggtgctgcatacaaagatcgcgtcaacgaacaaggtgaagtagaagatgatgagcgagttgcttatatacgagagcatttaatcgcttgccaccgcgcgattgaacaaggcgtcaatttaaaaggatattttgtattttcgctgttcgataattttgagtgggcatttggatatgataagcgctttgggattgtatacgtggattatgaaacgctagagcgcatcccgaaaaagagtgcattatggtataaggaaacgattataaacaacggattgaaagcagaaaaagataaaagatctcatcaccatcaccatcactaa

SEQ ID NO: 99 - DNA, 1386 bp, Artificial Sequence
  Derived by Lab Evolution
atgcttcagtttccgaaacattttatttggggagctgcaacttcatcgtatcaaattgaaggaacagcgactggagaagataaaatttactcgatctgggatcacttttcccgcattcctggcaaaatagcgaatggggataatggcgatattgcaattgatcattacaatcgttatgttgaagacatcgcattaatgaaagcgcttcatttgaaagcgtatcgattttcgactagttgggcgagactttattgtgaaacgccagggaagtttaacgaaaaaggtttagatttttataagcgtcttgtaaatgagctgctagagaacggtatcgagccaatgttgaccatttatcattgggatatgccacaagctcttcaagagaaaggtggctgggaaaatcgtgatatcgttcaatacttccaagaatacgctgctttcctttacgagaatcttggggatgtcgtgaaaaaatggattacgcataatgagccgtgggttgtcacctatttaggatatgggaatggcgaacatgccccagggattcaaaactttacatcatttttaaaagcagcacatcatgttcttctctcacacggggaagcggtaaaagcgtttcgagcaatcggtccgaaagatggggaagttggtattagtttgaatttgacacctggatatgcggttgatccgaaagatgaaaaagcagttgatgccgctcgaaaatgggacggctttaagaatcgttggtttttagatcctgtatttaagggacaatatccagcagatatgttagaagtgtataaagattatttaccagacgtttacaaagagggagatttacaaacgattcagcaaccgatcgactttttcggaattaactattatactacagcaacattaaaagattggaaaaaaggtgaccgtgaaccgatcgtatttgaacatgtgagcacaggaagacctgtgacggatatgaattgggaagtgaatccaaacggtttgtttgatttaatggtgcgattgaaaaaagattatggcgatattccattatacattaccgaaaacggtgctgcatacaaagatcgcgtcaacgaacaaggtgaagtagaagatgatgagcgagttgcttatatacgagagcatttaatcgcttgccaccgcgcgattgaacaaggcgtcaatttaaaaggatattatgtattttcgctgttcgataattttgagtgggcatttggatatgataagcgctttgggattgtatacgtggattatgaaacgctagagcgcatcccgaaaaagagtgcattatggtataaggaaacgattataaacaacggattgaaagcagaaaaagataaaagatctcatcaccatcaccatcactaa

SEQ ID NO: 100 - DNA, 1386 bp, Artificial Sequence
  Derived by Lab Evolution
atgcttcagtttccgaaacattttatttggggagctgcaacttcatcgtatcaaattgaaggaacagcgactggagaagataaaatttactcgatctgggatcacttttcccgcattcctggcaaaatagcgaatggggataatggcgatattgcaattgatcattacaatcgttatgttgaagacatcgcattaatgaaagcgcttcatttgaaagcgtatcgattttcgactagttgggcgagactttattgtgaaacgccagggaagtttaacgaaaaaggtttagatttttataagcgtcttgtaaatgagctgctagagaacggtatcgagccaatgttgaccatttatcattgggatatgccacaagctcttcaagagaaaggtggctgggaaaatcgtgatatcgttcaatacttccaagaatacgctgctttcctttacgagaatcttggggatgtcgtgaaaaaatggattacgcataatgagccgtgggttgtcacctatttaggatatgggaatggcgaacatgccccagggattcaaaactttacatcatttttaaaagcagcacatcatgttcttctctcacacggggaagcggtaaaagcgtttcgagcaatcggtccgaaagatggggaagttggtattagtttgaatttgacacctggatatgcggttgatccgaaagatgaaaaagcagttgatgccgctcgaaaatgggacggctttaagaatcgttggtttttagatcctgtatttaagggacaatatccagcagatatgttagaagtgtataaagattatttaccagacgtttacaaagagggagatttacaaacgattcagcaaccgatcgactttttcggagttaactattatactacagcaacattaaaagattggaaaaaaggtgaccgtgaaccgatcgtatttgaacatgtgagcacaggaagacctgtgacggatatgaattgggaagtgaatccaaacggtttgtttgatttaatggtgcgattgaaaaaagattatggcgatattccattatacattaccgaaaacggtgctgcatacaaagatcgcgtcaacgaacaaggtgaagtagaagatgatgagcgagttgcttatatacgagagcatttaatcgcttgccaccgcgcgattgaacaaggcgtcaatttaaaaggatattattattggtcgctgttcgataattttgagtgggcatttggatatgataagcgctttgggattgtatacgtggattatgaaacgctagagcgcatcccgaaaaagagtgcattatggtataaggaaacgattataaacaacggattgaaagcagaaaaagataaaagatctcatcaccatcaccatcactaa

SEQ ID NO: 101 - DNA, 1386 bp, Artificial Sequence
  Derived by Lab Evolution
atgcttcagtttccgaaacattttatttggggagctgcaacttcatcgtatcaaattgaaggaacagcgactggagaagataaaatttactcgatctgggatcacttttcccgcattcctggcaaaatagcgaatggggataatggcgatattgcaattgatcattacaatcgttatgttgaagacatcgcattaatgaaagcgcttcatttgaaagcgtatcgattttcgactagttgggcgagactttattgtgaaacgccagggaagtttaacgaaaaaggtttagatttttataagcgtcttgtaaatgagctgctagagaacggtatcgagccaatgttgaccatttatcattgggatatgccacaagctcttcaagagaaaggtggctgggaaaatcgtgatatcgttcaatacttccaagaatacgctgctttcctttacgagaatcttggggatgtcgtgaaaaaatggattacgcataatgagccgtgggttgtcacctatttaggatatgggaatggcgaacatgccccagggattcaaaactttacatcatttttaaaagcagcacatcatgttcttctctcacacggggaagcggtaaaagcgtttcgagcaatcggtccgaaagatggggaagttggtattagtttgaatttgacacctggatatgcggttgatccgaaagatgaaaaagcagttgatgccgctcgaaaatgggacggctttatgaatcgttggtttttagatcctgtatttaagggacaatatccagcagatatgttagaagtgtataaagattatttaccagacgtttacaaagagggagatttacaaacgattcagcaaccgatcgactttttcggaattaactattatactacagcaacattaaaagattggaaaaaaggtgaccgtgaaccgatcgtatttgaacatgtgagcacaggaagacctgtgacggatatgaattgggaagtgaatccaaacggtttgtttgatttaatggtgcgattgaaaaaagattatggcgatattccattatacattaccgaaaacggtgctgcatacaaagatcgcgtcaacgaacaaggtgaagtagaagatgatgagcgagttgcttatatacgagagcatttaatcgcttgccaccgcgcgattgaacaaggcgtcaatttaaaaggatattttgtattttcgctgttcgataattttgagtgggcatttggatatgataagcgctttgggattgtatacgtggattatgaaacgctagagcgcatcccgaaaaagagtgcattatggtataaggaaacgattataaacaacggattgaaagcagaaaaagataaaagatctcatcaccatcaccatcactaa

SEQ ID NO: 102 - DNA, 1386 bp, Artificial Sequence
  Derived by Lab Evolution
atgcttcagtttccgaaacattttatttggggagctgcaacttcatcgtatcaaattgaaggaacagcgactggagaagataaaatttactcgatctgggatcacttttcccgcattcctggcaaaatagcgaatggggataatggcgatattgcaattgatcattacaatcgttatgttgaagacatcgcattaatgaaagcgcttcatttgaaagcgtatcgattttcgactagttgggcgagactttattgtgaaacgccagggaagtttaacgaaaaaggtttagatttttataagcgtcttgtaaatgagctgctagagaacggtatcgagccaatgttgaccatttatcattgggatatgccacaagctcttcaagagaaaggtggctgggaaaatcgtgatatcgttcaatacttccaagaatacgctgctttcctttacgagaatcttggggatgtcgtgaaaaaatggattacgcataatgagccgtgggttgtcacctatttaggatatgggaatggcgaacatgccccagggattcaaaactttacatcatttttaaaagcagcacatcatgttcttctctcacacggggaagcggtaaaagcgtttcgagcaatcggtccgaaagatggggaagttggtattagtttgaatttgacacctggatatgcggttgatccgaaagatgaaaaagcagttgatgccgctcgaaaatgggacggctttatgaatcgttggtttttagatcctgtatttaagggacaatatccagcagatatgttagaagtgtataaagattatttaccagacgtttacaaagagggagatttacaaacgattcagcaaccgatcgactttttcggaattaactattatactacagcaacattaaaagattggaaaaaaggtgaccgtgaaccgatcgtatttgaacatgtgagcacaggaagacctgtgacggatatgaattgggaagtgaatccaaacggtttgtttgatttaatggtgcgattgaaaaaagattatggcgatattccattatacattaccgaaaacggtgctgcatacaaagatcgcgtcaacgaacaaggtgaagtagaagatgatgagcgagttgcttatatacgagagcatttaatcgcttgccaccgcgcgattgaacaaggcgtcaatttaaaaggatatttttattggtcgctgttcgataattttgagtgggcatttggatatgataagcgctttgggattgtatacgtggattatgaaacgctagagcgcatcccgaaaaagagtgcattatggtataaggaaacgattataaacaacggattgaaagcagaaaaagataaaagatctcatcaccatcaccatcactaa

SEQ ID NO: 103 - DNA, 1386 bp, Artificial Sequence
  Derived by Lab Evolution
atgcttcagtttccgaaacattttatttggggagctgcaacttcatcgtatcaaattgaaggaacagcgactggagaagataaaatttactcgatctgggatcacttttcccgcattcctggcaaaatagcgaatggggataatggcgatattgcaattgatcattacaatcgttatgttgaagacatcgcattaatgaaagcgcttcatttgaaagcgtatcgattttcgactagttgggcgagactttattgtgaaacgccagggaagtttaacgaaaaaggtttagatttttataagcgtcttgtaaatgagctgctagagaacggtatcgagccaatgttgaccatttatcattgggatatgccacaagctcttcaagagaaaggtggctgggaaaatcgtgatatcgttcaatacttccaagaatacgctgctttcctttacgagaatcttggggatgtcgtgaaaaaatggattacgcataatgagccgtgggttgtcacctatttaggatatgggaatggcgaacatgccccagggattcaaaactttacatcatttttaaaagcagcacatcatgttcttctctcacacggggaagcggtaaaagcgtttcgagcaatcggtccgaaagatggggaagttggtattagtttgaatttgacacctggatatgcggttgatccgaaagatgaaaaagcagttgatgccgctcgaaaatgggacggctttatgaatcgttggtttttagatcctgtatttaagggacaatatccagcagatatgttagaagtgtataaagattatttaccagacgtttacaaagagggagatttacaaacgattcagcaaccgatcgactttttcggaattaactattatactacagcaacattaaaagattggaaaaaaggtgaccgtgaaccgatcgtatttgaacatgtgagcacaggaagacctgtgacggatatgaattgggaagtgaatccaaacggtttgtttgatttaatggtgcgattgaaaaaagattatggcgatattccattatacattaccgaaaacggtgctgcatacaaagatcgcgtcaacgaacaaggtgaagtagaagatgatgagcgagttgcttatatacgagagcatttaatcgcttgccaccgcgcgattgaacaaggcgtcaatttaaaaggatattatgtattttcgctgttcgataattttgagtgggcatttggatatgataagcgctttgggattgtatacgtggattatgaaacgctagagcgcatcccgaaaaagagtgcattatggtataaggaaacgattataaacaacggattgaaagcagaaaaagataaaagatctcatcaccatcaccatcactaa

SEQ ID NO: 104 - DNA, 1386 bp, Artificial Sequence
  Derived by Lab Evolution
atgcttcagtttccgaaacattttatttggggagctgcaacttcatcgtatcaaattgaaggaacagcgactggagaagataaaatttactcgatctgggatcacttttcccgcattcctggcaaaatagcgaatggggataatggcgatattgcaattgatcattacaatcgttatgttgaagacatcgcattaatgaaagcgcttcatttgaaagcgtatcgattttcgactagttgggcgagactttattgtgaaacgccagggaagtttaacgaaaaaggtttagatttttataagcgtcttgtaaatgagctgctagagaacggtatcgagccaatgttgaccatttatcattgggatatgccacaagctcttcaagagaaaggtggctgggaaaatcgtgatatcgttcaatacttccaagaatacgctgctttcctttacgagaatcttggggatgtcgtgaaaaaatggattacgcataatgagccgtgggttgtcacctatttaggatatgggaatggcgaacatgccccagggattcaaaactttacatcatttttaaaagcagcacatcatgttcttctctcacacggggaagcggtaaaagcgtttcgagcaatcggtccgaaagatggggaagttggtattagtttgaatttgacacctggatatgcggttgatccgaaagatgaaaaagcagttgatgccgctcgaaaatgggacggctttatgaatcgttggtttttagatcctgtatttaagggacaatatccagcagatatgttagaagtgtataaagattatttaccagacgtttacaaagagggagatttacaaacgattcagcaaccgatcgactttttcggagttaactattatactacagcaacattaaaagattggaaaaaaggtgaccgtgaaccgatcgtatttgaacatgtgagcacaggaagacctgtgacggatatgaattgggaagtgaatccaaacggtttgtttgatttaatggtgcgattgaaaaaagattatggcgatattccattatacattaccgaaaacggtgctgcatacaaagatcgcgtcaacgaacaaggtgaagtagaagatgatgagcgagttgcttatatacgagagcatttaatcgcttgccaccgcgcgattgaacaaggcgtcaatttaaaaggatattttgtattttcgctgttcgataattttgagtgggcatttggatatgataagcgctttgggattgtatacgtggattatgaaacgctagagcgcatcccgaaaaagagtgcattatggtataaggaaacgattataaacaacggattgaaagcagaaaaagataaaagatctcatcaccatcaccatcactaa

SEQ ID NO: 105 - DNA, 1386 bp, Artificial Sequence
  Derived by Lab Evolution
atgcttcagtttccgaaacattttatttggggagctgcaacttcatcgtatcaaattgaaggaacagcgactggagaagataaaatttactcgatctgggatcacttttcccgcattcctggcaaaatagcgaatggggataatggcgatattgcaattgatcattacaatcgttatgttgaagacatcgcattaatgaaagcgcttcatttgaaagcgtatcgattttcgactagttgggcgagactttattgtgaaacgccagggaagtttaacgaaaaaggtttagatttttataagcgtcttgtaaatgagctgctagagaacggtatcgagccaatgttgaccatttatcattgggatatgccacaagctcttcaagagaaaggtggctgggaaaatcgtgatatcgttcaatacttccaagaatacgctgctttcctttacgagaatcttggggatgtcgtgaaaaaatggattacgcataatgagccgtgggttgtcacctatttaggatatgggaatggcgaacatgccccagggattcaaaactttacatcatttttaaaagcagcacatcatgttcttctctcacacggggaagcggtaaaagcgtttcgagcaatcggtccgaaagatggggaagttggtattagtttgaatttgacacctggatatgcggttgatccgaaagatgaaaaagcagttgatgccgctcgaaaatgggacggctttatgaatcgttggtttttagatcctgtatttaagggacaatatccagcagatatgttagaagtgtataaagattatttaccagacgtttacaaagagggagatttacaaacgattcagcaaccgatcgactttttcggagttaactattatactacagcaacattaaaagattggaaaaaaggtgaccgtgaaccgatcgtatttgaacatgtgagcacaggaagacctgtgacggatatgaattgggaagtgaatccaaacggtttgtttgatttaatggtgcgattgaaaaaagattatggcgatattccattatacattaccgaaaacggtgctgcatacaaagatcgcgtcaacgaacaaggtgaagtagaagatgatgagcgagttgcttatatacgagagcatttaatcgcttgccaccgcgcgattgaacaaggcgtcaatttaaaaggatattatgtattttcgctgttcgataattttgagtgggcatttggatatgataagcgctttgggattgtatacgtggattatgaaacgctagagcgcatcccgaaaaagagtgcattatggtataaggaaacgattataaacaacggattgaaagcagaaaaagataaaagatctcatcaccatcaccatcactaa

SEQ ID NO: 106 - DNA, 1386 bp, Artificial Sequence
  Derived by Lab Evolution
atgcttcagtttccgaaacattttatttggggagctgcaacttcatcgtatcaaattgaaggaacagcgactggagaagataaaatttactcgatctgggatcacttttcccgcattcctggcaaaatagcgaatggggataatggcgatattgcaattgatcattacaatcgttatgttgaagacatcgcattaatgaaagcgcttcatttgaaagcgtatcgattttcgactagttgggcgagactttattgtgaaacgccagggaagtttaacgaaaaaggtttagatttttataagcgtcttgtaaatgagctgctagagaacggtatcgagccaatgttgaccatttatcattgggatatgccacaagctcttcaagagaaaggtggctgggaaaatcgtgatatcgttcaatacttccaagaatacgctgctttcctttacgagaatcttggggatgtcgtgaaaaaatggattacgcataatgagccgtgggttgtcacctatttaggatatgggaatggcgaacatgccccagggattcaaaactttacatcatttttaaaagcagcacatcatgttcttctctcacacggggaagcggtaaaagcgtttcgagcaatcggtccgaaagatggggaagttggtattacgttgaatttgacacctggatatgcggttgatccgaaagatgaaaaagcagttgatgccgctcgaaaatgggacggctttaagaatcgttggtttttagatcctgtatttaagggacaatatccagcagatatgttagaagtgtataaagattatttaccagacgtttacaaagagggagatttacaaacgattcagcaaccgatcgactttttcggaattaactattatactacagcaacattaaaagattggaaaaaaggtgaccgtgaaccgatcgtatttgaacatgtgagcacaggaagacctgtgacggatatgaattgggaagtgaatccaaacggtttgtttgatttaatggtgcgattgaaaaaagattatggcgatattccattatacattaccgaaaacggtgctgcatacaaagatcgcgtcaacgaacaaggtgaagtagaagatgatgagcgagttgcttatatacgagagcatttaatcgcttgccaccgcgcgattgaacaaggcgtcaatttaaaaggatattttgtattttcgctgttcgataattttgagtgggcatttggatatgataagcgctttgggattgtatacgtggattatgaaacgctagagcgcatcccgaaaaagagtgcattatggtataaggaaacgattataaacaacggattgaaagcagaaaaagataaaagatctcatcaccatcaccatcactaa

SEQ ID NO: 107 - DNA, 1386 bp, Artificial Sequence
  Derived by Lab Evolution
atgcttcagtttccgaaacattttatttggggagctgcaacttcatcgtatcaaattgaaggaacagcgactggagaagataaaatttactcgatctgggatcacttttcccgcattcctggcaaaatagcgaatggggataatggcgatattgcaattgatcattacaatcgttatgttgaagacatcgcattaatgaaagcgcttcatttgaaagcgtatcgattttcgactagttgggcgagactttattgtgaaacgccagggaagtttaacgaaaaaggtttagatttttataagcgtcttgtaaatgagctgctagagaacggtatcgagccaatgttgaccatttatcattgggatatgccacaagctcttcaagagaaaggtggctgggaaaatcgtgatatcgttcaatacttccaagaatacgctgctttcctttacgagaatcttggggatgtcgtgaaaaaatggattacgcataatgagccgtgggttgtcacctatttaggatatgggaatggcgaacatgccccagggattcaaaactttacatcatttttaaaagcagcacatcatgttcttctctcacacggggaagcggtaaaagcgtttcgagcaatcggtccgaaagatggggaagttggtattacgttgaatttgacacctggatatgcggttgatccgaaagatgaaaaagcagttgatgccgctcgaaaatgggacggctttaagaatcgttggtttttagatcctgtatttaagggacaatatccagcagatatgttagaagtgtataaagattatttaccagacgtttacaaagagggagatttacaaacgattcagcaaccgatcgactttttcggagttaactattatactacagcaacattaaaagattggaaaaaaggtgaccgtgaaccgatcgtatttgaacatgtgagcacaggaagacctgtgacggatatgaattgggaagtgaatccaaacggtttgtttgatttaatggtgcgattgaaaaaagattatggcgatattccattatacattaccgaaaacggtgctgcatacaaagatcgcgtcaacgaacaaggtgaagtagaagatgatgagcgagttgcttatatacgagagcatttaatcgcttgccaccgcgcgattgaacaaggcgtcaatttaaaaggatattatgtattttcgctgttcgataattttgagtgggcatttggatatgataagcgctttgggattgtatacgtggattatgaaacgctagagcgcatcccgaaaaagagtgcattatggtataaggaaacgattataaacaacggattgaaagcagaaaaagataaaagatctcatcaccatcaccatcactaa

SEQ ID NO: 108 - DNA, 1386 bp, Artificial Sequence
  Derived by Lab Evolution
atgcttcagtttccgaaacattttatttggggagctgcaacttcatcgtatcaaattgaaggaacagcgactggagaagataaaatttactcgatctgggatcacttttcccgcattcctggcaaaatagcgaatggggataatggcgatattgcaattgatcattacaatcgttatgttgaagacatcgcattaatgaaagcgcttcatttgaaagcgtatcgattttcgactagttgggcgagactttattgtgaaacgccagggaagtttaacgaaaaaggtttagatttttataagcgtcttgtaaatgagctgctagagaacggtatcgagccaatgttgaccatttatcattgggatatgccacaagctcttcaagagaaaggtggctgggaaaatcgtgatatcgttcaatacttccaagaatacgctgctttcctttacgagaatcttggggatgtcgtgaaaaaatggattacgcataatgagccgtgggttgtcacctatttaggatatgggaatggcgaacatgccccagggattcaaaactttacatcatttttaaaagcagcacatcatgttcttctctcacacggggaagcggtaaaagcgtttcgagcaatcggtccgaaagatggggaaattggtattgcgttgaatttgacacctggatatgcggttgatccgaaagatgaaaaagcagttgatgccgctcgaaaatgggacggctttcataatcgttggtttttagatcctgtatttaagggacaatatccagcagatatgttagaagtgtataaagattatttaccagacgtttacaaagagggagatttacaaacgattcagcaaccgatcgactttttcggagttaactattatactacagcaacattaaaagattggaaaaaaggtgaccgtgaaccgatcgtatttgaacatgtgagcacaggaagacctgtgacggatatgaattgggaagtgaatccaaacggtttgtttgatttaatggtgcgattgaaaaaagattatggcgatattccattatacattaccgaaaacggtgctgcatacaaagatcgcgtcaacgaacaaggtgaagtagaagatgatgagcgagttgcttatatacgagagcatttaatcgcttgccaccgcgcgattgaacaaggcgtcaatttaaaaggatatttttattggtcgctgttcgataattttgagtgggcatttggatatgataagcgctttgggattgtatacgtggattatgaaacgctagagcgcatcccgaaaaagagtgcattatggtataaggaaacgattataaacaacggattgaaagcagaaaaagataaaagatctcatcaccatcaccatcactaa

SEQ ID NO: 109 - DNA, 1386 bp, Artificial Sequence
  Derived by Lab Evolution
atgcttcagtttccgaaacattttatttggggagctgcaacttcatcgtatcaaattgaaggaacagcgactggagaagataaaatttactcgatctgggatcacttttcccgcattcctggcaaaatagcgaatggggataatggcgatattgcaattgatcattacaatcgttatgttgaagacatcgcattaatgaaagcgcttcatttgaaagcgtatcgattttcgactagttgggcgagactttattgtgaaacgccagggaagtttaacgaaaaaggtttagatttttataagcgtcttgtaaatgagctgctagagaacggtatcgagccaatgttgaccatttatcattgggatatgccacaagctcttcaagagaaaggtggctgggaaaatcgtgatatcgttcaatacttccaagaatacgctgctttcctttacgagaatcttggggatgtcgtgaaaaaatggattacgcataatgagccgtgggttgtcacctatttaggatatgggaatggcgaacatgccccagggattcaaaactttacatcatttttaaaagcagcacatcatgttcttctctcacacggggaagcggtaaaagcgtttcgagcaatcggtccgaaagatggggaaattggtattgcgttgaatttgacacctggatatgcggttgatccgaaagatgaaaaagcagttgatgccgctcgaaaatgggacggctttcataatcgttggtttttagatcctgtatttaagggacaatatccagcagatatgttagaagtgtataaagattatttaccagacgtttacaaagagggagatttacaaacgattcagcaaccgatcgactttttcggagttaactattatactacagcaacattaaaagattggaaaaaaggtgaccgtgaaccgatcgtatttgaacatgtgagcacaggaagacctgtgacggatatgaattgggaagtgaatccaaacggtttgtttgatttaatggtgcgattgaaaaaagattatggcgatattccattatacattaccgaaaacggtgctgcatacaaagatcgcgtcaacgaacaaggtgaagtagaagatgatgagcgagttgcttatatacgagagcatttaatcgcttgccaccgcgcgattgaacaaggcgtcaatttaaaaggatattattattggtcgctgttcgataattttgagtgggcatttggatatgataagcgctttgggattgtatacgtggattatgaaacgctagagcgcatcccgaaaaagagtgcattatggtataaggaaacgattataaacaacggattgaaagcagaaaaagataaaagatctcatcaccatcaccatcactaa

SEQ ID NO: 110 - DNA, 1386 bp, Artificial Sequence
  Derived by Lab Evolution
atgcttcagtttccgaaacattttatttggggagctgcaacttcatcgtatcaaattgaaggaacagcgactggagaagataaaatttactcgatctgggatcacttttcccgcattcctggcaaaatagcgaatggggataatggcgatattgcaattgatcattacaatcgttatgttgaagacatcgcattaatgaaagcgcttcatttgaaagcgtatcgattttcgactagttgggcgagactttattgtgaaacgccagggaagtttaacgaaaaaggtttagatttttataagcgtcttgtaaatgagctgctagagaacggtatcgagccaatgttgaccatttatcattgggatatgccacaagctcttcaagagaaaggtggctgggaaaatcgtgatatcgttcaatacttccaagaatacgctgctttcctttacgagaatcttggggatgtcgtgaaaaaatggattacgcataatgagccgtgggttgtcacctatttaggatatgggaatggcgaacatgccccagggattcaaaactttacatcatttttaaaagcagcacatcatgttcttctctcacacggggaagcggtaaaagcgtttcgagcaatcggtccgaaagatggggaaattggtattgcgttgaatttgacacctggatatgcggttgatccgaaagatgaaaaagcagttgatgccgctcgaaaatgggacggctttaagaatcgttggtttttagatcctgtatttaagggacaatatccagcagatatgttagaagtgtataaagattatttaccagacgtttacaaagagggagatttacaaacgattcagcaaccgatcgactttttcggagttaactattatactacagcaacattaaaagattggaaaaaaggtgaccgtgaaccgatcgtatttgaacatgtgagcacaggaagacctgtgacggatatgaattgggaagtgaatccaaacggtttgtttgatttaatggtgcgattgaaaaaagattatggcgatattccattatacattaccgaaaacggtgctgcatacaaagatcgcgtcaacgaacaaggtgaagtagaagatgatgagcgagttgcttatatacgagagcatttaatcgcttgccaccgcgcgattgaacaaggcgtcaatttaaaaggatatttttattggtcgctgttcgataattttgagtgggcatttggatatgataagcgctttgggattgtatacgtggattatgaaacgctagagcgcatcccgaaaaagagtgcattatggtataaggaaacgattataaacaacggattgaaagcagaaaaagataaaagatctcatcaccatcaccatcactaa

SEQ ID NO: 111 - DNA, 1386 bp, Artificial Sequence
  Derived by Lab Evolution
atgcttcagtttccgaaacattttatttggggagctgcaacttcatcgtatcaaattgaaggaacagcgactggagaagataaaatttactcgatctgggatcacttttcccgcattcctggcaaaatagcgaatggggataatggcgatattgcaattgatcattacaatcgttatgttgaagacatcgcattaatgaaagcgcttcatttgaaagcgtatcgattttcgactagttgggcgagactttattgtgaaacgccagggaagtttaacgaaaaaggtttagatttttataagcgtcttgtaaatgagctgctagagaacggtatcgagccaatgttgaccatttatcattgggatatgccacaagctcttcaagagaaaggtggctgggaaaatcgtgatatcgttcaatacttccaagaatacgctgctttcctttacgagaatcttggggatgtcgtgaaaaaatggattacgcataatgagccgtgggttgtcacctatttaggatatgggaatggcgaacatgccccagggattcaaaactttacatcatttttaaaagcagcacatcatgttcttctctcacacggggaagcggtaaaagcgtttcgagcaatcggtccgaaagatggggaaattggtattgcgttgaatttgacacctggatatgcggttgatccgaaagatgaaaaagcagttgatgccgctcgaaaatgggacggctttatgaatcgttggtttttagatcctgtatttaagggacaatatccagcagatatgttagaagtgtataaagattatttaccagacgtttacaaagagggagatttacaaacgattcagcaaccgatcgactttttcggaattaactattatactacagcaacattaaaagattggaaaaaaggtgaccgtgaaccgatcgtatttgaacatgtgagcacaggaagacctgtgacggatatgaattgggaagtgaatccaaacggtttgtttgatttaatggtgcgattgaaaaaagattatggcgatattccattatacattaccgaaaacggtgctgcatacaaagatcgcgtcaacgaacaaggtgaagtagaagatgatgagcgagttgcttatatacgagagcatttaatcgcttgccaccgcgcgattgaacaaggcgtcaatttaaaaggatattttgtattttcgctgttcgataattttgagtgggcatttggatatgataagcgctttgggattgtatacgtggattatgaaacgctagagcgcatcccgaaaaagagtgcattatggtataaggaaacgattataaacaacggattgaaagcagaaaaagataaaagatctcatcaccatcaccatcactaa

SEQ ID NO: 112 - DNA, 1386 bp, Artificial Sequence
  Derived by Lab Evolution
atgcttcagtttccgaaacattttatttggggagctgcaacttcatcgtatcaaattgaaggaacagcgactggagaagataaaatttactcgatctgggatcacttttcccgcattcctggcaaaatagcgaatggggataatggcgatattgcaattgatcattacaatcgttatgttgaagacatcgcattaatgaaagcgcttcatttgaaagcgtatcgattttcgactagttgggcgagactttattgtgaaacgccagggaagtttaacgaaaaaggtttagatttttataagcgtcttgtaaatgagctgctagagaacggtatcgagccaatgttgaccatttatcattgggatatgccacaagctcttcaagagaaaggtggctgggaaaatcgtgatatcgttcaatacttccaagaatacgctgctttcctttacgagaatcttggggatgtcgtgaaaaaatggattacgcataatgagccgtgggttgtcacctatttaggatatgggaatggcgaacatgccccagggattcaaaactttacatcatttttaaaagcagcacatcatgttcttctctcacacggggaagcggtaaaagcgtttcgagcaatcggtccgaaagatggggaaattggtattgcgttgaatttgacacctggatatgcggttgatccgaaagatgaaaaagcagttgatgccgctcgaaaatgggacggctttatgaatcgttggtttttagatcctgtatttaagggacaatatccagcagatatgttagaagtgtataaagattatttaccagacgtttacaaagagggagatttacaaacgattcagcaaccgatcgactttttcggaattaactattatactacagcaacattaaaagattggaaaaaaggtgaccgtgaaccgatcgtatttgaacatgtgagcacaggaagacctgtgacggatatgaattgggaagtgaatccaaacggtttgtttgatttaatggtgcgattgaaaaaagattatggcgatattccattatacattaccgaaaacggtgctgcatacaaagatcgcgtcaacgaacaaggtgaagtagaagatgatgagcgagttgcttatatacgagagcatttaatcgcttgccaccgcgcgattgaacaaggcgtcaatttaaaaggatattatgtattttcgctgttcgataattttgagtgggcatttggatatgataagcgctttgggattgtatacgtggattatgaaacgctagagcgcatcccgaaaaagagtgcattatggtataaggaaacgattataaacaacggattgaaagcagaaaaagataaaagatctcatcaccatcaccatcactaa

SEQ ID NO: 113 - DNA, 1386 bp, Artificial Sequence
  Derived by Lab Evolution
atgcttcagtttccgaaacattttatttggggagctgcaacttcatcgtatcaaattgaaggaacagcgactggagaagataaaatttactcgatctgggatcacttttcccgcattcctggcaaaatagcgaatggggataatggcgatattgcaattgatcattacaatcgttatgttgaagacatcgcattaatgaaagcgcttcatttgaaagcgtatcgattttcgactagttgggcgagactttattgtgaaacgccagggaagtttaacgaaaaaggtttagatttttataagcgtcttgtaaatgagctgctagagaacggtatcgagccaatgttgaccatttatcattgggatatgccacaagctcttcaagagaaaggtggctgggaaaatcgtgatatcgttcaatacttccaagaatacgctgctttcctttacgagaatcttggggatgtcgtgaaaaaatggattacgcataatgagccgtgggttgtcacctatttaggatatgggaatggcgaacatgccccagggattcaaaactttacatcatttttaaaagcagcacatcatgttcttctctcacacggggaagcggtaaaagcgtttcgagcaatcggtccgaaagatggggaaattggtattgcgttgaatttgacacctggatatgcggttgatccgaaagatgaaaaagcagttgatgccgctcgaaaatgggacggctttatgaatcgttggtttttagatcctgtatttaagggacaatatccagcagatatgttagaagtgtataaagattatttaccagacgtttacaaagagggagatttacaaacgattcagcaaccgatcgactttttcggagttaactattatactacagcaacattaaaagattggaaaaaaggtgaccgtgaaccgatcgtatttgaacatgtgagcacaggaagacctgtgacggatatgaattgggaagtgaatccaaacggtttgtttgatttaatggtgcgattgaaaaaagattatggcgatattccattatacattaccgaaaacggtgctgcatacaaagatcgcgtcaacgaacaaggtgaagtagaagatgatgagcgagttgcttatatacgagagcatttaatcgcttgccaccgcgcgattgaacaaggcgtcaatttaaaaggatattttgtattttcgctgttcgataattttgagtgggcatttggatatgataagcgctttgggattgtatacgtggattatgaaacgctagagcgcatcccgaaaaagagtgcattatggtataaggaaacgattataaacaacggattgaaagcagaaaaagataaaagatctcatcaccatcaccatcactaa

SEQ ID NO: 114 - DNA, 1386 bp, Artificial Sequence
  Derived by Lab Evolution
atgcttcagtttccgaaacattttatttggggagctgcaacttcatcgtatcaaattgaaggaacagcgactggagaagataaaatttactcgatctgggatcacttttcccgcattcctggcaaaatagcgaatggggataatggcgatattgcaattgatcattacaatcgttatgttgaagacatcgcattaatgaaagcgcttcatttgaaagcgtatcgattttcgactagttgggcgagactttattgtgaaacgccagggaagtttaacgaaaaaggtttagatttttataagcgtcttgtaaatgagctgctagagaacggtatcgagccaatgttgaccatttatcattgggatatgccacaagctcttcaagagaaaggtggctgggaaaatcgtgatatcgttcaatacttccaagaatacgctgctttcctttacgagaatcttggggatgtcgtgaaaaaatggattacgcataatgagccgtgggttgtcacctatttaggatatgggaatggcgaacatgccccagggattcaaaactttacatcatttttaaaagcagcacatcatgttcttctctcacacggggaagcggtaaaagcgtttcgagcaatcggtccgaaagatggggaaattggtattagtttgaatttgacacctggatatgcggttgatccgaaagatgaaaaagcagttgatgccgctcgaaaatgggacggctttcataatcgttggtttttagatcctgtatttaagggacaatatccagcagatatgttagaagtgtataaagattatttaccagacgtttacaaagagggagatttacaaacgattcagcaaccgatcgactttttcggaattaactattatactacagcaacattaaaagattggaaaaaaggtgaccgtgaaccgatcgtatttgaacatgtgagcacaggaagacctgtgacggatatgaattgggaagtgaatccaaacggtttgtttgatttaatggtgcgattgaaaaaagattatggcgatattccattatacattaccgaaaacggtgctgcatacaaagatcgcgtcaacgaacaaggtgaagtagaagatgatgagcgagttgcttatatacgagagcatttaatcgcttgccaccgcgcgattgaacaaggcgtcaatttaaaaggatattattattggtcgctgttcgataattttgagtgggcatttggatatgataagcgctttgggattgtatacgtggattatgaaacgctagagcgcatcccgaaaaagagtgcattatggtataaggaaacgattataaacaacggattgaaagcagaaaaagataaaagatctcatcaccatcaccatcactaa

SEQ ID NO: 115 - DNA, 1386 bp, Artificial Sequence
  Derived by Lab Evolution
atgcttcagtttccgaaacattttatttggggagctgcaacttcatcgtatcaaattgaaggaacagcgactggagaagataaaatttactcgatctgggatcacttttcccgcattcctggcaaaatagcgaatggggataatggcgatattgcaattgatcattacaatcgttatgttgaagacatcgcattaatgaaagcgcttcatttgaaagcgtatcgattttcgactagttgggcgagactttattgtgaaacgccagggaagtttaacgaaaaaggtttagatttttataagcgtcttgtaaatgagctgctagagaacggtatcgagccaatgttgaccatttatcattgggatatgccacaagctcttcaagagaaaggtggctgggaaaatcgtgatatcgttcaatacttccaagaatacgctgctttcctttacgagaatcttggggatgtcgtgaaaaaatggattacgcataatgagccgtgggttgtcacctatttaggatatgggaatggcgaacatgccccagggattcaaaactttacatcatttttaaaagcagcacatcatgttcttctctcacacggggaagcggtaaaagcgtttcgagcaatcggtccgaaagatggggaaattggtattagtttgaatttgacacctggatatgcggttgatccgaaagatgaaaaagcagttgatgccgctcgaaaatgggacggctttaagaatcgttggtttttagatcctgtatttaagggacaatatccagcagatatgttagaagtgtataaagattatttaccagacgtttacaaagagggagatttacaaacgattcagcaaccgatcgactttttcggaattaactattatactacagcaacattaaaagattggaaaaaaggtgaccgtgaaccgatcgtatttgaacatgtgagcacaggaagacctgtgacggatatgaattgggaagtgaatccaaacggtttgtttgatttaatggtgcgattgaaaaaagattatggcgatattccattatacattaccgaaaacggtgctgcatacaaagatcgcgtcaacgaacaaggtgaagtagaagatgatgagcgagttgcttatatacgagagcatttaatcgcttgccaccgcgcgattgaacaaggcgtcaatttaaaaggatattatgtattttcgctgttcgataattttgagtgggcatttggatatgataagcgctttgggattgtatacgtggattatgaaacgctagagcgcatcccgaaaaagagtgcattatggtataaggaaacgattataaacaacggattgaaagcagaaaaagataaaagatctcatcaccatcaccatcactaa

SEQ ID NO: 116 - DNA, 1386 bp, Artificial Sequence
  Derived by Lab Evolution
atgcttcagtttccgaaacattttatttggggagctgcaacttcatcgtatcaaattgaaggaacagcgactggagaagataaaatttactcgatctgggatcacttttcccgcattcctggcaaaatagcgaatggggataatggcgatattgcaattgatcattacaatcgttatgttgaagacatcgcattaatgaaagcgcttcatttgaaagcgtatcgattttcgactagttgggcgagactttattgtgaaacgccagggaagtttaacgaaaaaggtttagatttttataagcgtcttgtaaatgagctgctagagaacggtatcgagccaatgttgaccatttatcattgggatatgccacaagctcttcaagagaaaggtggctgggaaaatcgtgatatcgttcaatacttccaagaatacgctgctttcctttacgagaatcttggggatgtcgtgaaaaaatggattacgcataatgagccgtgggttgtcacctatttaggatatgggaatggcgaacatgccccagggattcaaaactttacatcatttttaaaagcagcacatcatgttcttctctcacacggggaagcggtaaaagcgtttcgagcaatcggtccgaaagatggggaaattggtattagtttgaatttgacacctggatatgcggttgatccgaaagatgaaaaagcagttgatgccgctcgaaaatgggacggctttaagaatcgttggtttttagatcctgtatttaagggacaatatccagcagatatgttagaagtgtataaagattatttaccagacgtttacaaagagggagatttacaaacgattcagcaaccgatcgactttttcggaattaactattatactacagcaacattaaaagattggaaaaaaggtgaccgtgaaccgatcgtatttgaacatgtgagcacaggaagacctgtgacggatatgaattgggaagtgaatccaaacggtttgtttgatttaatggtgcgattgaaaaaagattatggcgatattccattatacattaccgaaaacggtgctgcatacaaagatcgcgtcaacgaacaaggtgaagtagaagatgatgagcgagttgcttatatacgagagcatttaatcgcttgccaccgcgcgattgaacaaggcgtcaatttaaaaggatattattattggtcgctgttcgataattttgagtgggcatttggatatgataagcgctttgggattgtatacgtggattatgaaacgctagagcgcatcccgaaaaagagtgcattatggtataaggaaacgattataaacaacggattgaaagcagaaaaagataaaagatctcatcaccatcaccatcactaa

SEQ ID NO: 117 - DNA, 1386 bp, Artificial Sequence
  Derived by Lab Evolution
atgcttcagtttccgaaacattttatttggggagctgcaacttcatcgtatcaaattgaaggaacagcgactggagaagataaaatttactcgatctgggatcacttttcccgcattcctggcaaaatagcgaatggggataatggcgatattgcaattgatcattacaatcgttatgttgaagacatcgcattaatgaaagcgcttcatttgaaagcgtatcgattttcgactagttgggcgagactttattgtgaaacgccagggaagtttaacgaaaaaggtttagatttttataagcgtcttgtaaatgagctgctagagaacggtatcgagccaatgttgaccatttatcattgggatatgccacaagctcttcaagagaaaggtggctgggaaaatcgtgatatcgttcaatacttccaagaatacgctgctttcctttacgagaatcttggggatgtcgtgaaaaaatggattacgcataatgagccgtgggttgtcacctatttaggatatgggaatggcgaacatgccccagggattcaaaactttacatcatttttaaaagcagcacatcatgttcttctctcacacggggaagcggtaaaagcgtttcgagcaatcggtccgaaagatggggaaattggtattagtttgaatttgacacctggatatgcggttgatccgaaagatgaaaaagcagttgatgccgctcgaaaatgggacggctttaagaatcgttggtttttagatcctgtatttaagggacaatatccagcagatatgttagaagtgtataaagattatttaccagacgtttacaaagagggagatttacaaacgattcagcaaccgatcgactttttcggagttaactattatactacagcaacattaaaagattggaaaaaaggtgaccgtgaaccgatcgtatttgaacatgtgagcacaggaagacctgtgacggatatgaattgggaagtgaatccaaacggtttgtttgatttaatggtgcgattgaaaaaagattatggcgatattccattatacattaccgaaaacggtgctgcatacaaagatcgcgtcaacgaacaaggtgaagtagaagatgatgagcgagttgcttatatacgagagcatttaatcgcttgccaccgcgcgattgaacaaggcgtcaatttaaaaggatatttttattggtcgctgttcgataattttgagtgggcatttggatatgataagcgctttgggattgtatacgtggattatgaaacgctagagcgcatcccgaaaaagagtgcattatggtataaggaaacgattataaacaacggattgaaagcagaaaaagataaaagatctcatcaccatcaccatcactaa

SEQ ID NO: 118 - DNA, 1386 bp, Artificial Sequence
  Derived by Lab Evolution
atgcttcagtttccgaaacattttatttggggagctgcaacttcatcgtatcaaattgaaggaacagcgactggagaagataaaatttactcgatctgggatcacttttcccgcattcctggcaaaatagcgaatggggataatggcgatattgcaattgatcattacaatcgttatgttgaagacatcgcattaatgaaagcgcttcatttgaaagcgtatcgattttcgactagttgggcgagactttattgtgaaacgccagggaagtttaacgaaaaaggtttagatttttataagcgtcttgtaaatgagctgctagagaacggtatcgagccaatgttgaccatttatcattgggatatgccacaagctcttcaagagaaaggtggctgggaaaatcgtgatatcgttcaatacttccaagaatacgctgctttcctttacgagaatcttggggatgtcgtgaaaaaatggattacgcataatgagccgtgggttgtcacctatttaggatatgggaatggcgaacatgccccagggattcaaaactttacatcatttttaaaagcagcacatcatgttcttctctcacacggggaagcggtaaaagcgtttcgagcaatcggtccgaaagatggggaaattggtattagtttgaatttgacacctggatatgcggttgatccgaaagatgaaaaagcagttgatgccgctcgaaaatgggacggctttaagaatcgttggtttttagatcctgtatttaagggacaatatccagcagatatgttagaagtgtataaagattatttaccagacgtttacaaagagggagatttacaaacgattcagcaaccgatcgactttttcggatttaactattatactacagcaacattaaaagattggaaaaaaggtgaccgtgaaccgatcgtatttgaacatgtgagcacaggaagacctgtgacggatatgaattgggaagtgaatccaaacggtttgtttgatttaatggtgcgattgaaaaaagattatggcgatattccattatacattaccgaaaacggtgctgcatacaaagatcgcgtcaacgaacaaggtgaagtagaagatgatgagcgagttgcttatatacgagagcatttaatcgcttgccaccgcgcgattgaacaaggcgtcaatttaaaaggatattatgtattttcgctgttcgataattttgagtgggcatttggatatgataagcgctttgggattgtatacgtggattatgaaacgctagagcgcatcccgaaaaagagtgcattatggtataaggaaacgattataaacaacggattgaaagcagaaaaagataaaagatctcatcaccatcaccatcactaa

SEQ ID NO: 119 - DNA, 1386 bp, Artificial Sequence
  Derived by Lab Evolution
atgcttcagtttccgaaacattttatttggggagctgcaacttcatcgtatcaaattgaaggaacagcgactggagaagataaaatttactcgatctgggatcacttttcccgcattcctggcaaaatagcgaatggggataatggcgatattgcaattgatcattacaatcgttatgttgaagacatcgcattaatgaaagcgcttcatttgaaagcgtatcgattttcgactagttgggcgagactttattgtgaaacgccagggaagtttaacgaaaaaggtttagatttttataagcgtcttgtaaatgagctgctagagaacggtatcgagccaatgttgaccatttatcattgggatatgccacaagctcttcaagagaaaggtggctgggaaaatcgtgatatcgttcaatacttccaagaatacgctgctttcctttacgagaatcttggggatgtcgtgaaaaaatggattacgcataatgagccgtgggttgtcacctatttaggatatgggaatggcgaacatgccccagggattcaaaactttacatcatttttaaaagcagcacatcatgttcttctctcacacggggaagcggtaaaagcgtttcgagcaatcggtccgaaagatggggaaattggtattagtttgaatttgacacctggatatgcggttgatccgaaagatgaaaaagcagttgatgccgctcgaaaatgggacggctttatgaatcgttggtttttagatcctgtatttaagggacaatatccagcagatatgttagaagtgtataaagattatttaccagacgtttacaaagagggagatttacaaacgattcagcaaccgatcgactttttcggaattaactattatactacagcaacattaaaagattggaaaaaaggtgaccgtgaaccgatcgtatttgaacatgtgagcacaggaagacctgtgacggatatgaattgggaagtgaatccaaacggtttgtttgatttaatggtgcgattgaaaaaagattatggcgatattccattatacattaccgaaaacggtgctgcatacaaagatcgcgtcaacgaacaaggtgaagtagaagatgatgagcgagttgcttatatacgagagcatttaatcgcttgccaccgcgcgattgaacaaggcgtcaatttaaaaggatattttgtattttcgctgttcgataattttgagtgggcatttggatatgataagcgctttgggattgtatacgtggattatgaaacgctagagcgcatcccgaaaaagagtgcattatggtataaggaaacgattataaacaacggattgaaagcagaaaaagataaaagatctcatcaccatcaccatcactaa

SEQ ID NO: 120 - DNA, 1386 bp, Artificial Sequence
  Derived by Lab Evolution
atgcttcagtttccgaaacattttatttggggagctgcaacttcatcgtatcaaattgaaggaacagcgactggagaagataaaatttactcgatctgggatcacttttcccgcattcctggcaaaatagcgaatggggataatggcgatattgcaattgatcattacaatcgttatgttgaagacatcgcattaatgaaagcgcttcatttgaaagcgtatcgattttcgactagttgggcgagactttattgtgaaacgccagggaagtttaacgaaaaaggtttagatttttataagcgtcttgtaaatgagctgctagagaacggtatcgagccaatgttgaccatttatcattgggatatgccacaagctcttcaagagaaaggtggctgggaaaatcgtgatatcgttcaatacttccaagaatacgctgctttcctttacgagaatcttggggatgtcgtgaaaaaatggattacgcataatgagccgtgggttgtcacctatttaggatatgggaatggcgaacatgccccagggattcaaaactttacatcatttttaaaagcagcacatcatgttcttctctcacacggggaagcggtaaaagcgtttcgagcaatcggtccgaaagatggggaaattggtattagtttgaatttgacacctggatatgcggttgatccgaaagatgaaaaagcagttgatgccgctcgaaaatgggacggctttatgaatcgttggtttttagatccggtatttaagggacaatatccagcagatatgttagaagtgtataaagattatttaccagacgtttacaaagagggagatttacaaacgattcagcaaccgatcgactttttcggagttaactattatactacagcaacattaaaagattggaaaaaaggtgaccgtgaaccgatcgtatttgaacatgtgagcacaggaagacctgtgacggatatgaattgggaagtgaatccaaacggtttgtttgatttaatggtgcgattgaaaaaagattatggcgatattccattatacattaccgaaaacggtgctgcatacaaagatcgcgtcaacgaacaaggtgaagtagaagatgatgagcgagttgcttatatacgagagcatttaatcgcttgccaccgcgcgattgaacaaggcgtcaatttaaaaggatattttgtattttcgctgttcgataattttgagtgggcatttggatatgataagcgctttgggattgtatacgtggattatgaaacgctagagcgcatcccgaaaaagagtgcattatggtataaggaaacgattataaacaacggattgaaagcagaaaaagataaaagatctcatcaccatcaccatcactaa

SEQ ID NO: 121 - DNA, 1386 bp, Artificial Sequence
  Derived by Lab Evolution
atgcttcagtttccgaaacattttatttggggagctgcaacttcatcgtatcaaattgaaggaacagcgactggagaagataaaatttactcgatctgggatcacttttcccgcattcctggcaaaatagcgaatggggataatggcgatattgcaattgatcattacaatcgttatgttgaagacatcgcattaatgaaagcgcttcatttgaaagcgtatcgattttcgactagttgggcgagactttattgtgaaacgccagggaagtttaacgaaaaaggtttagatttttataagcgtcttgtaaatgagctgctagagaacggtatcgagccaatgttgaccatttatcattgggatatgccacaagctcttcaagagaaaggtggctgggaaaatcgtgatatcgttcaatacttccaagaatacgctgctttcctttacgagaatcttggggatgtcgtgaaaaaatggattacgcataatgagccgtgggttgtcacctatttaggatatgggaatggcgaacatgccccagggattcaaaactttacatcatttttaaaagcagcacatcatgttcttctctcacacggggaagcggtaaaagcgtttcgagcaatcggtccgaaagatggggaaattggtattagtttgaatttgacacctggatatgcggttgatccgaaagatgaaaaagcagttgatgccgctcgaaaatgggacggctttatgaatcgttggtttttagatcctgtatttaagggacaatatccagcagatatgttagaagtgtataaagattatttaccagacgtttacaaagagggagatttacaaacgattcagcaaccgatcgactttttcggagttaactattatactacagcaacattaaaagattggaaaaaaggtgaccgtgaaccgatcgtatttgaacatgtgagcacaggaagacctgtgacggatatgaattgggaagtgaatccaaacggtttgtttgatttaatggtgcgattgaaaaaagattatggcgatattccattatacattaccgaaaacggtgctgcatacaaagatcgcgtcaacgaacaaggtgaagtagaagatgatgagcgagttgcttatatacgagagcatttaatcgcttgccaccgcgcgattgaacaaggcgtcaatttaaaaggatattttgtattttcgctgttcgataattttgagtgggcatttggatatgataagcgctttgggattgtatacgtggattatgaaacgctagagcgcatcccgaaaaagagtgcattatggtataaggaaacgattataaacaacggattgaaagcagaaaaagataaaagatctcatcaccatcaccatcactaa

SEQ ID NO: 122 - DNA, 1386 bp, Artificial Sequence
  Derived by Lab Evolution
atgcttcagtttccgaaacattttatttggggagctgcaacttcatcgtatcaaattgaaggaacagcgactggagaagataaaatttactcgatctgggatcacttttcccgcattcctggcaaaatagcgaatggggataatggcgatattgcaattgatcattacaatcgttatgttgaagacatcgcattaatgaaagcgcttcatttgaaagcgtatcgattttcgactagttgggcgagactttattgtgaaacgccagggaagtttaacgaaaaaggtttagatttttataagcgtcttgtaaatgagctgctagagaacggtatcgagccaatgttgaccatttatcattgggatatgccacaagctcttcaagagaaaggtggctgggaaaatcgtgatatcgttcaatacttccaagaatacgctgctttcctttacgagaatcttggggatgtcgtgaaaaaatggattacgcataatgagccgtgggttgtcacctatttaggatatgggaatggcgaacatgccccagggattcaaaactttacatcatttttaaaagcagcacatcatgttcttctctcacacggggaagcggtaaaagcgtttcgagcaatcggtccgaaagatggggaaattggtattagtttgaatttgacacctggatatgcggttgatccgaaagatgaaaaagcagttgatgccgctcgaaaatgggacggctttatgaatcgttggtttttagatcctgtatttaagggacaatatccagcagatatgttagaagtgtataaagattatttaccagacgtttacaaagagggagatttacaaacgattcagcaaccgatcgactttttcggagttaactattatactacagcaacattaaaagattggaaaaaaggtgaccgtgaaccgatcgtatttgaacatgtgagcacaggaagacctgtgacggatatgaattgggaagtgaatccaaacggtttgtttgatttaatggtgcgattgaaaaaagattatggcgatattccattatacattaccgaaaacggtgctgcatacaaagatcgcgtcaacgaacaaggtgaagtagaagatgatgagcgagttgcttatatacgagagcatttaatcgcttgccaccgcgcgattgaacaaggcgtcaatttaaaaggatattatgtattttcgctgttcgataattttgagtgggcatttggatatgataagcgctttgggattgtatacgtggattatgaaacgctagagcgcatcccgaaaaagagtgcattatggtataaggaaacgattataaacaacggattgaaagcagaaaaagataaaagatctcatcaccatcaccatcactaa

SEQ ID NO: 123 - DNA, 1386 bp, Artificial Sequence
  Derived by Lab Evolution
atgcttcagtttccgaaacattttatttggggagctgcaacttcatcgtatcaaattgaaggaacagcgactggagaagataaaatttactcgatctgggatcacttttcccgcattcctggcaaaatagcgaatggggataatggcgatattgcaattgatcattacaatcgttatgttgaagacatcgcattaatgaaagcgcttcatttgaaagcgtatcgattttcgactagttgggcgagactttattgtgaaacgccagggaagtttaacgaaaaaggtttagatttttataagcgtcttgtaaatgagctgctagagaacggtatcgagccaatgttgaccatttatcattgggatatgccacaagctcttcaagagaaaggtggctgggaaaatcgtgatatcgttcaatacttccaagaatacgctgctttcctttacgagaatcttggggatgtcgtgaaaaaatggattacgcataatgagccgtgggttgtcacctatttaggatatgggaatggcgaacatgccccagggattcaaaactttacatcatttttaaaagcagcacatcatgttcttctctcacacggggaagcggtaaaagcgtttcgagcaatcggtccgaaagatggggaaattggtattacgttgaatttgacacctggatatgcggttgatccgaaagatgaaaaagcagttgatgccgctcgaaaatgggacggctttcataatcgttggtttttagatcctgtatttaagggacaatatccagcagatatgttagaagtgtataaagattatttaccagacgtttacaaagagggagatttacaaacgattcagcaaccgatcgactttttcggagttaactattatactacagcaacattaaaagattggaaaaaaggtgaccgtgaaccgatcgtatttgaacatgtgagcacaggaagacctgtgacggatatgaattgggaagtgaatccaaacggtttgtttgatttaatggtgcgattgaaaaaagattatggcgatattccattatacattaccgaaaacggtgctgcatacaaagatcgcgtcaacgaacaaggtgaagtagaagatgatgagcgagttgcttatatacgagagcatttaatcgcttgccaccgcgcgattgaacaaggcgtcaatttaaaaggatattttgtattttcgctgttcgataattttgagtgggcatttggatatgataagcgctttgggattgtatacgtggattatgaaacgctagagcgcatcccgaaaaagagtgcattatggtataaggaaacgattataaacaacggattgaaagcagaaaaagataaaagatctcatcaccatcaccatcactaa

SEQ ID NO: 124 - DNA, 1386 bp, Artificial Sequence
  Derived by Lab Evolution
atgcttcagtttccgaaacattttatttggggagctgcaacttcatcgtatcaaattgaaggaacagcgactggagaagataaaatttactcgatctgggatcacttttcccgcattcctggcaaaatagcgaatggggataatggcgatattgcaattgatcattacaatcgttatgttgaagacatcgcattaatgaaagcgcttcatttgaaagcgtatcgattttcgactagttgggcgagactttattgtgaaacgccagggaagtttaacgaaaaaggtttagatttttataagcgtcttgtaaatgagctgctagagaacggtatcgagccaatgttgaccatttatcattgggatatgccacaagctcttcaagagaaaggtggctgggaaaatcgtgatatcgttcaatacttccaagaatacgctgctttcctttacgagaatcttggggatgtcgtgaaaaaatggattacgcataatgagccgtgggttgtcacctatttaggatatgggaatggcgaacatgccccagggattcaaaactttacatcatttttaaaagcagcacatcatgttcttctctcacacggggaagcggtaaaagcgtttcgagcaatcggtccgaaagatggggaaattggtattacgttgaatttgacacctggatatgcggttgatccgaaagatgaaaaagcagttgatgccgctcgaaaatgggacggctttaagaatcgttggtttttagatcctgtatttaagggacaatatccagcagatatgttagaagtgtataaagattatttaccagacgtttacaaagagggagatttacaaacgattcagcaaccgatcgactttttcggaattaactattatactacagcaacattaaaagattggaaaaaaggtgaccgtgaaccgatcgtatttgaacatgtgagcacaggaagacctgtgacggatatgaattgggaagtgaatccaaacggtttgtttgatttaatggtgcgattgaaaaaagattatggcgatattccattatacattaccgaaaacggtgctgcatacaaagatcgcgtcaacgaacaaggtgaagtagaagatgatgagcgagttgcttatatacgagagcatttaatcgcttgccaccgcgcgattgaacaaggcgtcaatttaaaaggatattttgtattttcgctgttcgataattttgagtgggcatttggatatgataagcgctttgggattgtatacgtggattatgaaacgctagagcgcatcccgaaaaagagtgcattatggtataaggaaacgattataaacaacggattgaaagcagaaaaagataaaagatctcatcaccatcaccatcactaa

SEQ ID NO: 125 - DNA, 1386 bp, Artificial Sequence
  Derived by Lab Evolution
atgcttcagtttccgaaagattttatttggggagctgcaacttcatcgtatcaaattgaaggaacagcgactggagaagataaaatttactcgatctgggatcacttttcccgcattcctggcaaaatagcgaatggggataatggcgatattgcaattgatcattacaatcgttatgttgaagacatcgcattaatgaaagcgcttcatttgaaagcgttgcgattttcgactagttgggcgagactttattgtgaaacgccagggaagtttaacgaaaaaggtttagatttttataagcgtcttgtaaatgagctgctagagaacggtatcgagccaatgttgaccatttatcattgggatatgccacaagctcttcaagagaaaggtggctgggaaaatcgtgatatcgttcaatacttccaagaatacgctgctttcctttacgagaatcttggggatgtcgtgaaaaaatggattacgcataatgagccgtgggttgtcacctatttaggatatgggaatggcgaacatgccccagggattcaaaactttacatcatttttaaaagcagcacatcatgttcttctctcacacggggaagcggtaaaagcgtttcgagcaatcggtccgaaagatggggaagttggtattgcgttgaatttgacacctggatatgcggttgatccgaaagatgaaaaagcagttgatgccgctcgaaaatgggacggctttatgaatcgttggtttttagatcctgtatttaagggacaatatccagcagatatgttagaagtgtataaagattatttaccagacgtttacaaagagggagatttacaaacgattcagcaaccgatcgactttttcggaattaactattatactacagcaacattaaaagattggaaaaaaggtgaccgtgaaccgatcgtatttgaacatgtgagcacaggaagacctgtgacggatatgaattgggaagtgaatccaaacggtttgtttgatttaatggtgcgattgaaaaaagattatggcgatattccattatacattaccgaaaacggtgctgcatacaaagatcgcgtcaacgaacaaggtgaagtagaagatgatgagcgagttgcttatatacgagagcatttaatcgcttgccaccgcgcgattgaacaaggcgtcaatttaaaaggatattatgtatggtcgctgttcgataattttgagtgggcatttggatatgataagcgctttgggattgtatacgtggattatgaaacgctagagcgcatcccgaaaaagagtgcattatggtataaggaaacgattataaacaacggattgaaagcagaaaaagataaaagatctcatcaccatcaccatcactaa

SEQ ID NO: 126 - DNA, 1386 bp, Artificial Sequence
  Derived by Lab Evolution
atgcttcagtttccgaaagattttatttggggagctgcaacttcatcgtatcaaattgaaggaacagcgactggagaagataaaatttactcgatctgggatcacttttcccgcattcctggcaaaatagcgaatggggataatggcgatattgcaattgatcattacaatcgttatgttgaagacatcgcattaatgaaagcgcttcatttgaaagcgttgcgattttcgactagttgggcgagactttattgtgaaacgccagggaagtttaacgaaaaaggtttagatttttataagcgtcttgtaaatgagctgctagagaacggtatcgagccaatgttgaccatttatcattgggatatgccacaagctcttcaagagaaaggtggctgggaaaatcgtgatatcgttcaatacttccaagaatacgctgctttcctttacgagaatcttggggatgtcgtgaaaaaatggattacgcataatgagccgtgggttgtcacctatttaggatatgggaatggcgaacatgccccagggattcaaaactttacatcatttttaaaagcagcacatcatgttcttctctcacacggggaagcggtaaaagcgtttcgagcaatcggtccgaaagatggggaagttggtattgcgttgaatttgacacctggatatgcggttgatccgaaagatgaaaaagcagttgatgccgctcgaaaatgggacggctttatgaatcgttggtttttagatcctgtatttaagggacaatatccagcagatatgttagaagtgtataaagattatttaccagacgtttacaaagagggagatttacaaacgattcagcaaccgatcgactttttcggagttaactattatactacagcaacattaaaagattggaaaaaaggtgaccgtgaaccgatcgtatttgaacatgtgagcacaggaagacctgtgacggatatgaattgggaagtgaatccaaacggtttgtttgatttaatggtgcgattgaaaaaagattatggcgatattccattatacattaccgaaaacggtgctgcatacaaagatcgcgtcaacgaacaaggtgaagtagaagatgatgagcgagttgcttatatacgagagcatttaatcgcttgccaccgcgcgattgaacaaggcgtcaatttaaaaggatattattattggtcgctgttcgataattttgagtgggcatttggatatgataagcgctttgggattgtatacgtggattatgaaacgctagagcgcatcccgaaaaagagtgcattatggtataaggaaacgattataaacaacggattgaaagcagaaaaagataaaagatctcatcaccatcaccatcactaa

SEQ ID NO: 127 - DNA, 1386 bp, Artificial Sequence
  Derived by Lab Evolution
atgcttcagtttccgaaagattttatttggggagctgcaacttcatcgtatcaaattgaaggaacagcgactggagaagataaaatttactcgatctgggatcacttttcccgcattcctggcaaaatagcgaatggggataatggcgatattgcaattgatcattacaatcgttatgttgaagacatcgcattaatgaaagcgcttcatttgaaagcgttgcgattttcgactagttgggcgagactttattgtgaaacgccagggaagtttaacgaaaaaggtttagatttttataagcgtcttgtaaatgagctgctagagaacggtatcgagccaatgttgaccatttatcattgggatatgccacaagctcttcaagagaaaggtggctgggaaaatcgtgatatcgttcaatacttccaagaatacgctgctttcctttacgagaatcttggggatgtcgtgaaaaaatggattacgcataatgagccgtgggttgtcacctatttaggatatgggaatggcgaacatgccccagggattcaaaactttacatcatttttaaaagcagcacatcatgttcttctctcacacggggaagcggtaaaagcgtttcgagcaatcggtccgaaagatggggaagttggtattgcgttgaatttgacacctggatatgcggttgatccgaaagatgaaaaagcagttgatgccgctcgaaaatgggacggctttatgaatcgttggtttttagatcctgtatttaagggacaatatccagcagatatgttagaagtgtataaagattatttaccagacgtttacaaagagggagatttacaaacgattcagcaaccgatcgactttttcggagttaactattatactacagcaacattaaaagattggaaaaaaggtgaccgtgaaccgatcgtatttgaacatgtgagcacaggaagacctgtgacggatatgaattgggaagtgaatccaaacggtttgtttgatttaatggtgcgattgaaaaaagattatggcgatattccattatacattaccgaaaacggtgctgcatacaaagatcgcgtcaacgaacaaggtgaagtagaagatgatgagcgagttgcttatatacgagagcatttaatcgcttgccaccgcgcgattgaacaaggcgtcaatttaaaaggatattatgtatggtcgctgttcgataattttgagtgggcatttggatatgataagcgctttgggattgtatacgtggattatgaaacgctagagcgcatcccgaaaaagagtgcattatggtataaggaaacgattataaacaacggattgaaagcagaaaaagataaaagatctcatcaccatcaccatcactaa

SEQ ID NO: 128 - DNA, 1386 bp, Artificial Sequence
  Derived by Lab Evolution
atgcttcagtttccgaaagattttatttggggagctgcaacttcatcgtatcaaattgaaggaacagcgactggagaagataaaatttactcgatctgggatcacttttcccgcattcctggcaaaatagcgaatggggataatggcgatattgcaattgatcattacaatcgttatgttgaagacatcgcattaatgaaagcgcttcatttgaaagcgttgcgattttcgactagttgggcgagactttattgtgaaacgccagggaagtttaacgaaaaaggtttagatttttataagcgtcttgtaaatgagctgctagagaacggtatcgagccaatgttgaccatttatcattgggatatgccacaagctcttcaagagaaaggtggctgggaaaatcgtgatatcgttcaatacttccaagaatacgctgctttcctttacgagaatcttggggatgtcgtgaaaaaatggattacgcataatgagccgtgggttgtcacctatttaggatatgggaatggcgaacatgccccagggattcaaaactttacatcatttttaaaagcagcacatcatgttcttctctcacacggggaagcggtaaaagcgtttcgagcaatcggtccgaaagatggggaagttggtattagtttgaatttgacacctggatatgcggttgatccgaaagatgaaaaagcagttgatgccgctcgaaaatgggacggctttaagaatcgttggtttttagatcctgtatttaagggacaatatccagcagatatgttagaagtgtataaagattatttaccagacgtttacaaagagggagatttacaaacgattcagcaaccgatcgactttttcggaattaactattatactacagcaacattaaaagattggaaaaaaggtgaccgtgaaccgatcgtatttgaacatgtgagcacaggaagacctgtgacggatatgaattgggaagtgaatccaaacggtttgtttgatttaatggtgcgattgaaaaaagattatggcgatattccattatacattaccgaaaacggtgctgcatacaaagatcgcgtcaacgaacaaggtgaagtagaagatgatgagcgagttgcttatatacgagagcatttaatcgcttgccaccgcgcgattgaacaaggcgtcaatttaaaaggatattatgtatggtcgctgttcgataattttgagtgggcatttggatatgataagcgctttgggattgtatacgtggattatgaaacgctagagcgcatcccgaaaaagagtgcattatggtataaggaaacgattataaacaacggattgaaagcagaaaaagataaaagatctcatcaccatcaccatcactaa

SEQ ID NO: 129 - DNA, 1386 bp, Artificial Sequence
  Derived by Lab Evolution
atgcttcagtttccgaaagattttatttggggagctgcaacttcatcgtatcaaattgaaggaacagcgactggagaagataaaatttactcgatctgggatcacttttcccgcattcctggcaaaatagcgaatggggataatggcgatattgcaattgatcattacaatcgttatgttgaagacatcgcattaatgaaagcgcttcatttgaaagcgttgcgattttcgactagttgggcgagactttattgtgaaacgccagggaagtttaacgaaaaaggtttagatttttataagcgtcttgtaaatgagctgctagagaacggtatcgagccaatgttgaccatttatcattgggatatgccacaagctcttcaagagaaaggtggctgggaaaatcgtgatatcgttcaatacttccaagaatacgctgctttcctttacgagaatcttggggatgtcgtgaaaaaatggattacgcataatgagccgtgggttgtcacctatttaggatatgggaatggcgaacatgccccagggattcaaaactttacatcatttttaaaagcagcacatcatgttcttctctcacacggggaagcggtaaaagcgtttcgagcaatcggtccgaaagatggggaagttggtattagtttgaatttgacacctggatatgcggttgatccgaaagatgaaaaagcagttgatgccgctcgaaaatgggacggctttaagaatcgttggtttttagatcctgtatttaagggacaatatccagcagatatgttagaagtgtataaagattatttaccagacgtttacaaagagggagatttacaaacgattcagcaaccgatcgactttttcggagttaactattatactacagcaacattaaaagattggaaaaaaggtgaccgtgaaccgatcgtatttgaacatgtgagcacaggaagacctgtgacggatatgaattgggaagtgaatccaaacggtttgtttgatttaatggtgcgattgaaaaaagattatggcgatattccattatacattaccgaaaacggtgctgcatacaaagatcgcgtcaacgaacaaggtgaagtagaagatgatgagcgagttgcttatatacgagagcatttaatcgcttgccaccgcgcgattgaacaaggcgtcaatttaaaaggatattatgtatggtcgctgttcgataattttgagtgggcatttggatatgataagcgctttgggattgtatacgtggattatgaaacgctagagcgcatcccgaaaaagagtgcattatggtataaggaaacgattataaacaacggattgaaagcagaaaaagataaaagatctcatcaccatcaccatcactaa

SEQ ID NO: 130 - DNA, 1386 bp, Artificial Sequence
  Derived by Lab Evolution
atgcttcagtttccgaaagattttatttggggagctgcaacttcatcgtatcaaattgaaggaacagcgactggagaagataaaatttactcgatctgggatcacttttcccgcattcctggcaaaatagcgaatggggataatggcgatattgcaattgatcattacaatcgttatgttgaagacatcgcattaatgaaagcgcttcatttgaaagcgttgcgattttcgactagttgggcgagactttattgtgaaacgccagggaagtttaacgaaaaaggtttagatttttataagcgtcttgtaaatgagctgctagagaacggtatcgagccaatgttgaccatttatcattgggatatgccacaagctcttcaagagaaaggtggctgggaaaatcgtgatatcgttcaatacttccaagaatacgctgctttcctttacgagaatcttggggatgtcgtgaaaaaatggattacgcataatgagccgtgggttgtcacctatttaggatatgggaatggcgaacatgccccagggattcaaaactttacatcatttttaaaagcagcacatcatgttcttctctcacacggggaagcggtaaaagcgtttcgagcaatcggtccgaaagatggggaagttggtattagtttgaatttgacacctggatatgcggttgatccgaaagatgaaaaagcagttgatgccgctcgaaaatgggacggctttatgaatcgttggtttttagatcctgtatttaagggacaatatccagcagatatgttagaagtgtataaagattatttaccagacgtttacaaagagggagatttacaaacgattcagcaaccgatcgactttttcggaattaactattatactacagcaacattaaaagattggaaaaaaggtgaccgtgaaccgatcgtatttgaacatgtgagcacaggaagacctgtgacggatatgaattgggaagtgaatccaaacggtttgtttgatttaatggtgcgattgaaaaaagattatggcgatattccattatacattaccgaaaacggtgctgcatacaaagatcgcgtcaacgaacaaggtgaagtagaagatgatgagcgagttgcttatatacgagagcatttaatcgcttgccaccgcgcgattgaacaaggcgtcaatttaaaaggatatttttattggtcgctgttcgataattttgagtgggcatttggatatgataagcgctttgggattgtatacgtggattatgaaacgctagagcgcatcccgaaaaagagtgcattatggtataaggaaacgattataaacaacggattgaaagcagaaaaagataaaagatctcatcaccatcaccatcactaa

SEQ ID NO: 131 - DNA, 1386 bp, Artificial Sequence
  Derived by Lab Evolution
atgcttcagtttccgaaagattttatttggggagctgcaacttcatcgtatcaaattgaaggaacagcgactggagaagataaaatttactcgatctgggatcacttttcccgcattcctggcaaaatagcgaatggggataatggcgatattgcaattgatcattacaatcgttatgttgaagacatcgcattaatgaaagcgcttcatttgaaagcgttgcgattttcgactagttgggcgagactttattgtgaaacgccagggaagtttaacgaaaaaggtttagatttttataagcgtcttgtaaatgagctgctagagaacggtatcgagccaatgttgaccatttatcattgggatatgccacaagctcttcaagagaaaggtggctgggaaaatcgtgatatcgttcaatacttccaagaatacgctgctttcctttacgagaatcttggggatgtcgtgaaaaaatggattacgcataatgagccgtgggttgtcacctatttaggatatgggaatggcgaacatgccccagggattcaaaactttacatcatttttaaaagcagcacatcatgttcttctctcacacggggaagcggtaaaagcgtttcgagcaatcggtccgaaagatggggaagttggtattacgttgaatttgacacctggatatgcggttgatccgaaagatgaaaaagcagttgatgccgctcgaaaatgggacggctttaagaatcgttggtttttagatcctgtatttaagggacaatatccagcagatatgttagaagtgtataaagattatttaccagacgtttacaaagagggagatttacaaacgattcagcaaccgatcgactttttcggagttaactattatactacagcaacattaaaagattggaaaaaaggtgaccgtgaaccgatcgtatttgaacatgtgagcacaggaagacctgtgacggatatgaattgggaagtgaatccaaacggtttgtttgatttaatggtgcgattgaaaaaagattatggcgatattccattatacattaccgaaaacggtgctgcatacaaagatcgcgtcaacgaacaaggtgaagtagaagatgatgagcgagttgcttatatacgagagcatttaatcgcttgccaccgcgcgattgaacaaggcgtcaatttaaaaggatattattattggtcgctgttcgataattttgagtgggcatttggatatgataagcgctttgggattgtatacgtggattatgaaacgctagagcgcatcccgaaaaagagtgcattatggtataaggaaacgattataaacaacggattgaaagcagaaaaagataaaagatctcatcaccatcaccatcactaa

SEQ ID NO: 132 - DNA, 1386 bp, Artificial Sequence
  Derived by Lab Evolution
atgcttcagtttccgaaagattttatttggggagctgcaacttcatcgtatcaaattgaaggaacagcgactggagaagataaaatttactcgatctgggatcacttttcccgcattcctggcaaaatagcgaatggggataatggcgatattgcaattgatcattacaatcgttatgttgaagacatcgcattaatgaaagcgcttcatttgaaagcgttgcgattttcgactagttgggcgagactttattgtgaaacgccagggaagtttaacgaaaaaggtttagatttttataagcgtcttgtaaatgagctgctagagaacggtatcgagccaatgttgaccatttatcattgggatatgccacaagctcttcaagagaaaggtggctgggaaaatcgtgatatcgttcaatacttccaagaatacgctgctttcctttacgagaatcttggggatgtcgtgaaaaaatggattacgcataatgagccgtgggttgtcacctatttaggatatgggaatggcgaacatgccccagggattcaaaactttacatcatttttaaaagcagcacatcatgttcttctctcacacggggaagcggtaaaagcgtttcgagcaatcggtccgaaagatggggaaattggtattgcgttgaatttgacacctggatatgcggttgatccgaaagatgaaaaagcagttgatgccgctcgaaaatgggacggctttatgaatcgttggtttttagatcctgtatttaagggacaatatccagcagatatgttagaagtgtataaagattatttaccagacgtttacaaagagggagatttacaaacgattcagcaaccgatcgactttttcggaattaactattatactacagcaacattaaaagattggaaaaaaggtgaccgtgaaccgatcgtatttgaacatgtgagcacaggaagacctgtgacggatatgaattgggaagtgaatccaaacggtttgtttgatttaatggtgcgattgaaaaaagattatggcgatattccattatacattaccgaaaacggtgctgcatacaaagatcgcgtcaacgaacaaggtgaagtagaagatgatgagcgagttgcttatatacgagagcatttaatcgcttgccaccgcgcgattgaacaaggcgtcaatttaaaaggatattatgtatggtcgctgttcgataattttgagtgggcatttggatatgataagcgctttgggattgtatacgtggattatgaaacgctagagcgcatcccgaaaaagagtgcattatggtataaggaaacgattataaacaacggattgaaagcagaaaaagataaaagatctcatcaccatcaccatcactaa

SEQ ID NO: 133 - DNA, 1386 bp, Artificial Sequence
  Derived by Lab Evolution
atgcttcagtttccgaaagattttatttggggagctgcaacttcatcgtatcaaattgaaggaacagcgactggagaagataaaatttactcgatctgggatcacttttcccgcattcctggcaaaatagcgaatggggataatggcgatattgcaattgatcattacaatcgttatgttgaagacatcgcattaatgaaagcgcttcatttgaaagcgttgcgattttcgactagttgggcgagactttattgtgaaacgccagggaagtttaacgaaaaaggtttagatttttataagcgtcttgtaaatgagctgctagagaacggtatcgagccaatgttgaccatttatcattgggatatgccacaagctcttcaagagaaaggtggctgggaaaatcgtgatatcgttcaatacttccaagaatacgctgctttcctttacgagaatcttggggatgtcgtgaaaaaatggattacgcataatgagccgtgggttgtcacctatttaggatatgggaatggcgaacatgccccagggattcaaaactttacatcatttttaaaagcagcacatcatgttcttctctcacacggggaagcggtaaaagcgtttcgagcaatcggtccgaaagatggggaaattggtattgcgttgaatttgacacctggatatgcggttgatccgaaagatgaaaaagcagttgatgccgctcgaaaatgggacggctttatgaatcgttggtttttagatcctgtatttaagggacaatatccagcagatatgttagaagtgtataaagattatttaccagacgtttacaaagagggagatttacaaacgattcagcaaccgatcgactttttcggagttaactattatactacagcaacattaaaagattggaaaaaaggtgaccgtgaaccgatcgtatttgaacatgtgagcacaggaagacctgtgacggatatgaattgggaagtgaatccaaacggtttgtttgatttaatggtgcgattgaaaaaagattatggcgatattccattatacattaccgaaaacggtgctgcatacaaagatcgcgtcaacgaacaaggtgaagtagaagatgatgagcgagttgcttatatacgagagcatttaatcgcttgccaccgcgcgattgaacaaggcgtcaatttaaaaggatattatgtatggtcgctgttcgataattttgagtgggcatttggatatgataagcgctttgggattgtatacgtggattatgaaacgctagagcgcatcccgaaaaagagtgcattatggtataaggaaacgattataaacaacggattgaaagcagaaaaagataaaagatctcatcaccatcaccatcactaa

SEQ ID NO: 134 - DNA, 1386 bp, Artificial Sequence
  Derived by Lab Evolution
atgcttcagtttccgaaagattttatttggggagctgcaacttcatcgtatcaaattgaaggaacagcgactggagaagataaaatttactcgatctgggatcacttttcccgcattcctggcaaaatagcgaatggggataatggcgatattgcaattgatcattacaatcgttatgttgaagacatcgcattaatgaaagcgcttcatttgaaagcgttgcgattttcgactagttgggcgagactttattgtgaaacgccagggaagtttaacgaaaaaggtttagatttttataagcgtcttgtaaatgagctgctagagaacggtatcgagccaatgttgaccatttatcattgggatatgccacaagctcttcaagagaaaggtggctgggaaaatcgtgatatcgttcaatacttccaagaatacgctgctttcctttacgagaatcttggggatgtcgtgaaaaaatggattacgcataatgagccgtgggttgtcacctatttaggatatgggaatggcgaacatgccccagggattcaaaactttacatcatttttaaaagcagcacatcatgttcttctctcacacggggaagcggtaaaagcgtttcgagcaatcggtccgaaagatggggaaattggtattagtttgaatttgacacctggatatgcggttgatccgaaagatgaaaaagcagttgatgccgctcgaaaatgggacggctttaagaatcgttggtttttagatcctgtatttaagggacaatatccagcagatatgttagaagtgtataaagattatttaccagacgtttacaaagagggagatttacaaacgattcagcaaccgatcgactttttcggaattaactattatactacagcaacattaaaagattggaaaaaaggtgaccgtgaaccgatcgtatttgaacatgtgagcacaggaagacctgtgacggatatgaattgggaagtgaatccaaacggtttgtttgatttaatggtgcgattgaaaaaagattatggcgatattccattatacattaccgaaaacggtgctgcatacaaagatcgcgtcaacgaacaaggtgaagtagaagatgatgagcgagttgcttatatacgagagcatttaatcgcttgccaccgcgcgattgaacaaggcgtcaatttaaaaggatattatgtatggtcgctgttcgataattttgagtgggcatttggatatgataagcgctttgggattgtatacgtggattatgaaacgctagagcgcatcccgaaaaagagtgcattatggtataaggaaacgattataaacaacggattgaaagcagaaaaagataaaagatctcatcaccatcaccatcactaa

SEQ ID NO: 135 - DNA, 1386 bp, Artificial Sequence
  Derived by Lab Evolution
atgcttcagtttccgaaagattttatttggggagctgcaacttcatcgtatcaaattgaaggaacagcgactggagaagataaaatttactcgatctgggatcacttttcccgcattcctggcaaaatagcgaatggggataatggcgatattgcaattgatcattacaatcgttatgttgaagacatcgcattaatgaaagcgcttcatttgaaagcgttgcgattttcgactagttgggcgagactttattgtgaaacgccagggaagtttaacgaaaaaggtttagatttttataagcgtcttgtaaatgagctgctagagaacggtatcgagccaatgttgaccatttatcattgggatatgccacaagctcttcaagagaaaggtggctgggaaaatcgtgatatcgttcaatacttccaagaatacgctgctttcctttacgagaatcttggggatgtcgtgaaaaaatggattacgcataatgagccgtgggttgtcacctatttaggatatgggaatggcgaacatgccccagggattcaaaactttacatcatttttaaaagcagcacatcatgttcttctctcacacggggaagcggtaaaagcgtttcgagcaatcggtccgaaagatggggaaattggtattagtttgaatttgacacctggatatgcggttgatccgaaagatgaaaaagcagttgatgccgctcgaaaatgggacggctttatgaatcgttggtttttagatcctgtatttaagggacaatatccagcagatatgttagaagtgtataaagattatttaccagacgtttacaaagagggagatttacaaacgattcagcaaccgatcgactttttcggagttaactattatactacagcaacattaaaagattggaaaaaaggtgaccgtgaaccgatcgtatttgaacatgtgagcacaggaagacctgtgacggatatgaattgggaagtgaatccaaacggtttgtttgatttaatggtgcgattgaaaaaagattatggcgatattccattatacattaccgaaaacggtgctgcatacaaagatcgcgtcaacgaacaaggtgaagtagaagatgatgagcgagttgcttatatacgagagcatttaatcgcttgccaccgcgcgattgaacaaggcgtcaatttaaaaggatattattattggtcgctgttcgataattttgagtgggcatttggatatgataagcgctttgggattgtatacgtggattatgaaacgctagagcgcatcccgaaaaagagtgcattatggtataaggaaacgattataaacaacggattgaaagcagaaaaagataaaagatctcatcaccatcaccatcactaa

SEQ ID NO: 136 - DNA, 1386 bp, Artificial Sequence
  Derived by Lab Evolution
atgcttcagtttccgaaagattttatttggggagctgcaacttcatcgtatcaaattgaaggaacagcgactggagaagataaaatttactcgatctgggatcacttttcccgcattcctggcaaaatagcgaatggggataatggcgatattgcaattgatcattacaatcgttatgttgaagacatcgcattaatgaaagcgcttcatttgaaagcgtatcgattttcgactagttgggcgagactttattgtgaaacgccagggaagtttaacgaaaaaggtttagatttttataagcgtcttgtaaatgagctgctagagaacggtatcgagccaatgttgaccatttatcattgggatatgccacaagctcttcaagagaaaggtggctgggaaaatcgtgatatcgttcaatacttccaagaatacgctgctttcctttacgagaatcttggggatgtcgtgaaaaaatggattacgcataatgagccgtgggttgtcacctatttaggatatgggaatggcgaacatgccccagggattcaaaactttacatcatttttaaaagcagcacatcatgttcttctctcacacggggaagcggtaaaagcgtttcgagcaatcggtccgaaagatggggaagttggtattgcgttgaatttgacacctggatatgcggttgatccgaaagatgaaaaagcagttgatgccgctcgaaaatgggacggctttcataatcgttggtttttagatcctgtatttaagggacaatatccagcagatatgttagaagtgtataaagattatttaccagacgtttacaaagagggagatttacaaacgattcagcaaccgatcgactttttcggaattaactattatactacagcaacattaaaagattggaaaaaaggtgaccgtgaaccgatcgtatttgaacatgtgagcacaggaagacctgtgacggatatgaattgggaagtgaatccaaacggtttgtttgatttaatggtgcgattgaaaaaagattatggcgatattccattatacattaccgaaaacggtgctgcatacaaagatcgcgtcaacgaacaaggtgaagtagaagatgatgagcgagttgcttatatacgagagcatttaatcgcttgccaccgcgcgattgaacaaggcgtcaatttaaaaggatattttgtatggtcgctgttcgataattttgagtgggcatttggatatgataagcgctttgggattgtatacgtggattatgaaacgctagagcgcatcccgaaaaagagtgcattatggtataaggaaacgattataaacaacggattgaaagcagaaaaagataaaagatctcatcaccatcaccatcactaa

SEQ ID NO: 137 - DNA, 1386 bp, Artificial Sequence
  Derived by Lab Evolution
atgcttcagtttccgaaagattttatttggggagctgcaacttcatcgtatcaaattgaaggaacagcgactggagaagataaaatttactcgatctgggatcacttttcccgcattcctggcaaaatagcgaatggggataatggcgatattgcaattgatcattacaatcgttatgttgaagacatcgcattaatgaaagcgcttcatttgaaagcgtatcgattttcgactagttgggcgagactttattgtgaaacgccagggaagtttaacgaaaaaggtttagatttttataagcgtcttgtaaatgagctgctagagaacggtatcgagccaatgttgaccatttatcattgggatatgccacaagctcttcaagagaaaggtggctgggaaaatcgtgatatcgttcaatacttccaagaatacgctgctttcctttacgagaatcttggggatgtcgtgaaaaaatggattacgcataatgagccgtgggttgtcacctatttaggatatgggaatggcgaacatgccccagggattcaaaactttacatcatttttaaaagcagcacatcatgttcttctctcacacggggaagcggtaaaagcgtttcgagcaatcggtccgaaagatggggaagttggtattgcgttgaatttgacacctggatatgcggttgatccgaaagatgaaaaagcagttgatgccgctcgaaaatgggacggctttcataatcgttggtttttagatcctgtatttaagggacaatatccagcagatatgttagaagtgtataaagattatttaccagacgtttacaaagagggagatttacaaacgattcagcaaccgatcgactttttcggagttaactattatactacagcaacattaaaagattggaaaaaaggtgaccgtgaaccgatcgtatttgaacatgtgagcacaggaagacctgtgacggatatgaattgggaagtgaatccaaacggtttgtttgatttaatggtgcgattgaaaaaagattatggcgatattccattatacattaccgaaaacggtgctgcatacaaagatcgcgtcaacgaacaaggtgaagtagaagatgatgagcgagttgcttatatacgagagcatttaatcgcttgccaccgcgcgattgaacaaggcgtcaatttaaaaggatattatgtattttcgctgttcgataattttgagtgggcatttggatatgataagcgctttgggattgtatacgtggattatgaaacgctagagcgcatcccgaaaaagagtgcattatggtataaggaaacgattataaacaacggattgaaagcagaaaaagataaaagatctcatcaccatcaccatcactaa

SEQ ID NO: 138 - DNA, 1386 bp, Artificial Sequence
  Derived by Lab Evolution
atgcttcagtttccgaaagattttatttggggagctgcaacttcatcgtatcaaattgaaggaacagcgactggagaagataaaatttactcgatctgggatcacttttcccgcattcctggcaaaatagcgaatggggataatggcgatattgcaattgatcattacaatcgttatgttgaagacatcgcattaatgaaagcgcttcatttgaaagcgtatcgattttcgactagttgggcgagactttattgtgaaacgccagggaagtttaacgaaaaaggtttagatttttataagcgtcttgtaaatgagctgctagagaacggtatcgagccaatgttgaccatttatcattgggatatgccacaagctcttcaagagaaaggtggctgggaaaatcgtgatatcgttcaatacttccaagaatacgctgctttcctttacgagaatcttggggatgtcgtgaaaaaatggattacgcataatgagccgtgggttgtcacctatttaggatatgggaatggcgaacatgccccagggattcaaaactttacatcatttttaaaagcagcacatcatgttcttctctcacacggggaagcggtaaaagcgtttcgagcaatcggtccgaaagatggggaagttggtattgcgttgaatttgacacctggatatgcggttgatccgaaagatgaaaaagcagttgatgccgctcgaaaatgggacggctttaagaatcgttggtttttagatcctgtatttaagggacaatatccagcagatatgttagaagtgtataaagattatttaccagacgtttacaaagagggagatttacaaacgattcagcaaccgatcgactttttcggaattaactattatactacagcaacattaaaagattggaaaaaaggtgaccgtgaaccgatcgtatttgaacatgtgagcacaggaagacctgtgacggatatgaattgggaagtgaatccaaacggtttgtttgatttaatggtgcgattgaaaaaagattatggcgatattccattatacattaccgaaaacggtgctgcatacaaagatcgcgtcaacgaacaaggtgaagtagaagatgatgagcgagttgcttatatacgagagcatttaatcgcttgccaccgcgcgattgaacaaggcgtcaatttaaaaggatattatgtatggtcgctgttcgataattttgagtgggcatttggatatgataagcgctttgggattgtatacgtggattatgaaacgctagagcgcatcccgaaaaagagtgcattatggtataaggaaacgattataaacaacggattgaaagcagaaaaagataaaagatctcatcaccatcaccatcactaa

SEQ ID NO: 139 - DNA, 1386 bp, Artificial Sequence
  Derived by Lab Evolution
atgcttcagtttccgaaagattttatttggggagctgcaacttcatcgtatcaaattgaaggaacagcgactggagaagataaaatttactcgatctgggatcacttttcccgcattcctggcaaaatagcgaatggggataatggcgatattgcaattgatcattacaatcgttatgttgaagacatcgcattaatgaaagcgcttcatttgaaagcgtatcgattttcgactagttgggcgagactttattgtgaaacgccagggaagtttaacgaaaaaggtttagatttttataagcgtcttgtaaatgagctgctagagaacggtatcgagccaatgttgaccatttatcattgggatatgccacaagctcttcaagagaaaggtggctgggaaaatcgtgatatcgttcaatacttccaagaatacgctgctttcctttacgagaatcttggggatgtcgtgaaaaaatggattacgcataatgagccgtgggttgtcacctatttaggatatgggaatggcgaacatgccccagggattcaaaactttacatcatttttaaaagcagcacatcatgttcttctctcacacggggaagcggtaaaagcgtttcgagcaatcggtccgaaagatggggaagttggtattgcgttgaatttgacacctggatatgcggttgatccgaaagatgaaaaagcagttgatgccgctcgaaaatgggacggctttaagaatcgttggtttttagatcctgtatttaagggacaatatccagcagatatgttagaagtgtataaagattatttaccagacgtttacaaagagggagatttacaaacgattcagcaaccgatcgactttttcggagttaactattatactacagcaacattaaaagattggaaaaaaggtgaccgtgaaccgatcgtatttgaacatgtgagcacaggaagacctgtgacggatatgaattgggaagtgaatccaaacggtttgtttgatttaatggtgcgattgaaaaaagattatggcgatattccattatacattaccgaaaacggtgctgcatacaaagatcgcgtcaacgaacaaggtgaagtagaagatgatgagcgagttgcttatatacgagagcatttaatcgcttgccaccgcgcgattgaacaaggcgtcaatttaaaaggatattttgtattttcgctgttcgataattttgagtgggcatttggatatgataagcgctttgggattgtatacgtggattatgaaacgctagagcgcatcccgaaaaagagtgcattatggtataaggaaacgattataaacaacggattgaaagcagaaaaagataaaagatctcatcaccatcaccatcactaa

SEQ ID NO: 140 - DNA, 1386 bp, Artificial Sequence
  Derived by Lab Evolution
atgcttcagtttccgaaagattttatttggggagctgcaacttcatcgtatcaaattgaaggaacagcgactggagaagataaaatttactcgatctgggatcacttttcccgcattcctggcaaaatagcgaatggggataatggcgatattgcaattgatcattacaatcgttatgttgaagacatcgcattaatgaaagcgcttcatttgaaagcgtatcgattttcgactagttgggcgagactttattgtgaaacgccagggaagtttaacgaaaaaggtttagatttttataagcgtcttgtaaatgagctgctagagaacggtatcgagccaatgttgaccatttatcattgggatatgccacaagctcttcaagagaaaggtggctgggaaaatcgtgatatcgttcaatacttccaagaatacgctgctttcctttacgagaatcttggggatgtcgtgaaaaaatggattacgcataatgagccgtgggttgtcacctatttaggatatgggaatggcgaacatgccccagggattcaaaactttacatcatttttaaaagcagcacatcatgttcttctctcacacggggaagcggtaaaagcgtttcgagcaatcggtccgaaagatggggaagttggtattgcgttgaatttgacacctggatatgcggttgatccgaaagatgaaaaagcagttgatgccgctcgaaaatgggacggctttatgaatcgttggtttttagatcctgtatttaagggacaatatccagcagatatgttagaagtgtataaagattatttaccagacgtttacaaagagggagatttacaaacgattcagcaaccgatcgactttttcggaattaactattatactacagcaacattaaaagattggaaaaaaggtgaccgtgaaccgatcgtatttgaacatgtgagcacaggaagacctgtgacggatatgaattgggaagtgaatccaaacggtttgtttgatttaatggtgcgattgaaaaaagattatggcgatattccattatacattaccgaaaacggtgctgcatacaaagatcgcgtcaacgaacaaggtgaagtagaagatgatgagcgagttgcttatatacgagagcatttaatcgcttgccaccgcgcgattgaacaaggcgtcaatttaaaaggatattttgtattttcgctgttcgataattttgagtgggcatttggatatgataagcgctttgggattgtatacgtggattatgaaacgctagagcgcatcccgaaaaagagtgcattatggtataaggaaacgattataaacaacggattgaaagcagaaaaagataaaagatctcatcaccatcaccatcactaa

SEQ ID NO: 141 - DNA, 1386 bp, Artificial Sequence
  Derived by Lab Evolution
atgcttcagtttccgaaagattttatttggggagctgcaacttcatcgtatcaaattgaaggaacagcgactggagaagataaaatttactcgatctgggatcacttttcccgcattcctggcaaaatagcgaatggggataatggcgatattgcaattgatcattacaatcgttatgttgaagacatcgcattaatgaaagcgcttcatttgaaagcgtatcgattttcgactagttgggcgagactttattgtgaaacgccagggaagtttaacgaaaaaggtttagatttttataagcgtcttgtaaatgagctgctagagaacggtatcgagccaatgttgaccatttatcattgggatatgccacaagctcttcaagagaaaggtggctgggaaaatcgtgatatcgttcaatacttccaagaatacgctgctttcctttacgagaatcttggggatgtcgtgaaaaaatggattacgcataatgagccgtgggttgtcacctatttaggatatgggaatggcgaacatgccccagggattcaaaactttacatcatttttaaaagcagcacatcatgttcttctctcacacggggaagcggtaaaagcgtttcgagcaatcggtccgaaagatggggaagttggtattgcgttgaatttgacacctggatatgcggttgatccgaaagatgaaaaagcagttgatgccgctcgaaaatgggacggctttatgaatcgttggtttttagatcctgtatttaagggacaatatccagcagatatgttagaagtgtataaagattatttaccagacgtttacaaagagggagatttacaaacgattcagcaaccgatcgactttttcggaattaactattatactacagcaacattaaaagattggaaaaaaggtgaccgtgaaccgatcgtatttgaacatgtgagcacaggaagacctgtgacggatatgaattgggaagtgaatccaaacggtttgtttgatttaatggtgcgattgaaaaaagattatggcgatattccattatacattaccgaaaacggtgctgcatacaaagatcgcgtcaacgaacaaggtgaagtagaagatgatgagcgagttgcttatatacgagagcatttaatcgcttgccaccgcgcgattgaacaaggcgtcaatttaaaaggatatttttattggtcgctgttcgataattttgagtgggcatttggatatgataagcgctttgggattgtatacgtggattatgaaacgctagagcgcatcccgaaaaagagtgcattatggtataaggaaacgattataaacaacggattgaaagcagaaaaagataaaagatctcatcaccatcaccatcactaa

SEQ ID NO: 142 - DNA, 1386 bp, Artificial Sequence
  Derived by Lab Evolution
atgcttcagtttccgaaagattttatttggggagctgcaacttcatcgtatcaaattgaaggaacagcgactggagaagataaaatttactcgatctgggatcacttttcccgcattcctggcaaaatagcgaatggggataatggcgatattgcaattgatcattacaatcgttatgttgaagacatcgcattaatgaaagcgcttcatttgaaagcgtatcgattttcgactagttgggcgagactttattgtgaaacgccagggaagtttaacgaaaaaggtttagatttttataagcgtcttgtaaatgagctgctagagaacggtatcgagccaatgttgaccatttatcattgggatatgccacaagctcttcaagagaaaggtggctgggaaaatcgtgatatcgttcaatacttccaagaatacgctgctttcctttacgagaatcttggggatgtcgtgaaaaaatggattacgcataatgagccgtgggttgtcacctatttaggatatgggaatggcgaacatgccccagggattcaaaactttacatcatttttaaaagcagcacatcatgttcttctctcacacggggaagcggtaaaagcgtttcgagcaatcggtccgaaagatggggaagttggtattgcgttgaatttgacacctggatatgcggttgatccgaaagatgaaaaagcagttgatgccgctcgaaaatgggacggctttatgaatcgttggtttttagatcctgtatttaagggacaatatccagcagatatgttagaagtgtataaagattatttaccagacgtttacaaagagggagatttacaaacgattcagcaaccgatcgactttttcggagttaactattatactacagcaacattaaaagattggaaaaaaggtgaccgtgaaccgatcgtatttgaacatgtgagcacaggaagacctgtgacggatatgaattgggaagtgaatccaaacggtttgtttgatttaatggtgcgattgaaaaaagattatggcgatattccattatacattaccgaaaacggtgctgcatacaaagatcgcgtcaacgaacaaggtgaagtagaagatgatgagcgagttgcttatatacgagagcatttaatcgcttgccaccgcgcgattgaacaaggcgtcaatttaaaaggatatttttattggtcgctgttcgataattttgagtgggcatttggatatgataagcgctttgggattgtatacgtggattatgaaacgctagagcgcatcccgaaaaagagtgcattatggtataaggaaacgattataaacaacggattgaaagcagaaaaagataaaagatctcatcaccatcaccatcactaa

SEQ ID NO: 143 - DNA, 1386 bp, Artificial Sequence
  Derived by Lab Evolution
atgcttcagtttccgaaagattttatttggggagctgcaacttcatcgtatcaaattgaaggaacagcgactggagaagataaaatttactcgatctgggatcacttttcccgcattcctggcaaaatagcgaatggggataatggcgatattgcaattgatcattacaatcgttatgttgaagacatcgcattaatgaaagcgcttcatttgaaagcgtatcgattttcgactagttgggcgagactttattgtgaaacgccagggaagtttaacgaaaaaggtttagatttttataagcgtcttgtaaatgagctgctagagaacggtatcgagccaatgttgaccatttatcattgggatatgccacaagctcttcaagagaaaggtggctgggaaaatcgtgatatcgttcaatacttccaagaatacgctgctttcctttacgagaatcttggggatgtcgtgaaaaaatggattacgcataatgagccgtgggttgtcacctatttaggatatgggaatggcgaacatgccccagggattcaaaactttacatcatttttaaaagcagcacatcatgttcttctctcacacggggaagcggtaaaagcgtttcgagcaatcggtccgaaagatggggaagttggtattgcgttgaatttgacacctggatatgcggttgatccgaaagatgaaaaagcagttgatgccgctcgaaaatgggacggctttatgaatcgttggtttttagatcctgtatttaagggacaatatccagcagatatgttagaagtgtataaagattatttaccagacgtttacaaagagggagatttacaaacgattcagcaaccgatcgactttttcggagttaactattatactacagcaacattaaaagattggaaaaaaggtgaccgtgaaccgatcgtatttgaacatgtgagcacaggaagacctgtgacggatatgaattgggaagtgaatccaaacggtttgtttgatttaatggtgcgattgaaaaaagattatggcgatattccattatacattaccgaaaacggtgctgcatacaaagatcgcgtcaacgaacaaggtgaagtagaagatgatgagcgagttgcttatatacgagagcatttaatcgcttgccaccgcgcgattgaacaaggcgtcaatttaaaaggatattatgtattttcgctgttcgataattttgagtgggcatttggatatgataagcgctttgggattgtatacgtggattatgaaacgctagagcgcatcccgaaaaagagtgcattatggtataaggaaacgattataaacaacggattgaaagcagaaaaagataaaagatctcatcaccatcaccatcactaa

SEQ ID NO: 144 - DNA, 1386 bp, Artificial Sequence
  Derived by Lab Evolution
atgcttcagtttccgaaagattttatttggggagctgcaacttcatcgtatcaaattgaaggaacagcgactggagaagataaaatttactcgatctgggatcacttttcccgcattcctggcaaaatagcgaatggggataatggcgatattgcaattgatcattacaatcgttatgttgaagacatcgcattaatgaaagcgcttcatttgaaagcgtatcgattttcgactagttgggcgagactttattgtgaaacgccagggaagtttaacgaaaaaggtttagatttttataagcgtcttgtaaatgagctgctagagaacggtatcgagccaatgttgaccatttatcattgggatatgccacaagctcttcaagagaaaggtggctgggaaaatcgtgatatcgttcaatacttccaagaatacgctgctttcctttacgagaatcttggggatgtcgtgaaaaaatggattacgcataatgagccgtgggttgtcacctatttaggatatgggaatggcgaacatgccccagggattcaaaactttacatcatttttaaaagcagcacatcatgttcttctctcacacggggaagcggtaaaagcgtttcgagcaatcggtccgaaagatggggaagttggtattagtttgaatttgacacctggatatgcggttgatccgaaagatgaaaaagcagttgatgccgctcgaaaatgggacggctttcataatcgttggtttttagatcctgtatttaagggacaatatccagcagatatgttagaagtgtataaagattatttaccagacgtttacaaagagggagatttacaaacgattcagcaaccgatcgactttttcggaattaactattatactacagcaacattaaaagattggaaaaaaggtgaccgtgaaccgatcgtatttgaacatgtgagcacaggaagacctgtgacggatatgaattgggaagtgaatccaaacggtttgtttgatttaatggtgcgattgaaaaaagattatggcgatattccattatacattaccgaaaacggtgctgcatacaaagatcgcgtcaacgaacaaggtgaagtagaagatgatgagcgagttgcttatatacgagagcatttaatcgcttgccaccgcgcgattgaacaaggcgtcaatttaaaaggatattttgtattttcgctgttcgataattttgagtgggcatttggatatgataagcgctttgggattgtatacgtggattatgaaacgctagagcgcatcccgaaaaagagtgcattatggtataaggaaacgattataaacaacggattgaaagcagaaaaagataaaagatctcatcaccatcaccatcactaa

SEQ ID NO: 145 - DNA, 1386 bp, Artificial Sequence
  Derived by Lab Evolution
atgcttcagtttccgaaagattttatttggggagctgcaacttcatcgtatcaaattgaaggaacagcgactggagaagataaaatttactcgatctgggatcacttttcccgcattcctggcaaaatagcgaatggggataatggcgatattgcaattgatcattacaatcgttatgttgaagacatcgcattaatgaaagcgcttcatttgaaagcgtatcgattttcgactagttgggcgagactttattgtgaaacgccagggaagtttaacgaaaaaggtttagatttttataagcgtcttgtaaatgagctgctagagaacggtatcgagccaatgttgaccatttatcattgggatatgccacaagctcttcaagagaaaggtggctgggaaaatcgtgatatcgttcaatacttccaagaatacgctgctttcctttacgagaatcttggggatgtcgtgaaaaaatggattacgcataatgagccgtgggttgtcacctatttaggatatgggaatggcgaacatgccccagggattcaaaactttacatcatttttaaaagcagcacatcatgttcttctctcacacggggaagcggtaaaagcgtttcgagcaatcggtccgaaagatggggaagttggtattagtttgaatttgacacctggatatgcggttgatccgaaagatgaaaaagcagttgatgccgctcgaaaatgggacggctttaagaatcgttggtttttagatcctgtatttaagggacaatatccagcagatatgttagaagtgtataaagattatttaccagacgtttacaaagagggagatttacaaacgattcagcaaccgatcgactttttcggaattaactattatactacagcaacattaaaagattggaaaaaaggtgaccgtgaaccgatcgtatttgaacatgtgagcacaggaagacctgtgacggatatgaattgggaagtgaatccaaacggtttgtttgatttaatggtgcgattgaaaaaagattatggcgatattccattatacattaccgaaaacggtgctgcatacaaagatcgcgtcaacgaacaaggtgaagtagaagatgatgagcgagttgcttatatacgagagcatttaatcgcttgccaccgcgcgattgaacaaggcgtcaatttaaaaggatattttgtattttcgctgttcgataattttgagtgggcatttggatatgataagcgctttgggattgtatacgtggattatgaaacgctagagcgcatcccgaaaaagagtgcattatggtataaggaaacgattataaacaacggattgaaagcagaaaaagataaaagatctcatcaccatcaccatcactaa

SEQ ID NO: 146 - DNA, 1386 bp, Artificial Sequence
  Derived by Lab Evolution
atgcttcagtttccgaaagattttatttggggagctgcaacttcatcgtatcaaattgaaggaacagcgactggagaagataaaatttactcgatctgggatcacttttcccgcattcctggcaaaatagcgaatggggataatggcgatattgcaattgatcattacaatcgttatgttgaagacatcgcattaatgaaagcgcttcatttgaaagcgtatcgattttcgactagttgggcgagactttattgtgaaacgccagggaagtttaacgaaaaaggtttagatttttataagcgtcttgtaaatgagctgctagagaacggtatcgagccaatgttgaccatttatcattgggatatgccacaagctcttcaagagaaaggtggctgggaaaatcgtgatatcgttcaatacttccaagaatacgctgctttcctttacgagaatcttggggatgtcgtgaaaaaatggattacgcataatgagccgtgggttgtcacctatttaggatatgggaatggcgaacatgccccagggattcaaaactttacatcatttttaaaagcagcacatcatgttcttctctcacacggggaagcggtaaaagcgtttcgagcaatcggtccgaaagatggggaagttggtattagtttgaatttgacacctggatatgcggttgatccgaaagatgaaaaagcagttgatgccgctcgaaaatgggacggctttaagaatcgttggtttttagatcctgtatttaagggacaatatccagcagatatgttagaagtgtataaagattatttaccagacgtttacaaagagggagatttacaaacgattcagcaaccgatcgactttttcggaattaactattatactacagcaacattaaaagattggaaaaaaggtgaccgtgaaccgatcgtatttgaacatgtgagcacaggaagacctgtgacggatatgaattgggaagtgaatccaaacggtttgtttgatttaatggtgcgattgaaaaaagattatggcgatattccattatacattaccgaaaacggtgctgcatacaaagatcgcgtcaacgaacaaggtgaagtagaagatgatgagcgagttgcttatatacgagagcatttaatcgcttgccaccgcgcgattgaacaaggcgtcaatttaaaaggatatttttattggtcgctgttcgataattttgagtgggcatttggatatgataagcgctttgggattgtatacgtggattatgaaacgctagagcgcatcccgaaaaagagtgcattatggtataaggaaacgattataaacaacggattgaaagcagaaaaagataaaagatctcatcaccatcaccatcactaa

SEQ ID NO: 147 - DNA, 1386 bp, Artificial Sequence
  Derived by Lab Evolution
atgcttcagtttccgaaagattttatttggggagctgcaacttcatcgtatcaaattgaaggaacagcgactggagaagataaaatttactcgatctgggatcacttttcccgcattcctggcaaaatagcgaatggggataatggcgatattgcaattgatcattacaatcgttatgttgaagacatcgcattaatgaaagcgcttcatttgaaagcgtatcgattttcgactagttgggcgagactttattgtgaaacgccagggaagtttaacgaaaaaggtttagatttttataagcgtcttgtaaatgagctgctagagaacggtatcgagccaatgttgaccatttatcattgggatatgccacaagctcttcaagagaaaggtggctgggaaaatcgtgatatcgttcaatacttccaagaatacgctgctttcctttacgagaatcttggggatgtcgtgaaaaaatggattacgcataatgagccgtgggttgtcacctatttaggatatgggaatggcgaacatgccccagggattcaaaactttacatcatttttaaaagcagcacatcatgttcttctctcacacggggaagcggtaaaagcgtttcgagcaatcggtccgaaagatggggaagttggtattagtttgaatttgacacctggatatgcggttgatccgaaagatgaaaaagcagttgatgccgctcgaaaatgggacggctttaagaatcgttggtttttagatcctgtatttaagggacaatatccagcagatatgttagaagtgtataaagattatttaccagacgtttacaaagagggagatttacaaacgattcagcaaccgatcgactttttcggaattaactattatactacagcaacattaaaagattggaaaaaaggtgaccgtgaaccgatcgtatttgaacatgtgagcacaggaagacctgtgacggatatgaattgggaagtgaatccaaacggtttgtttgatttaatggtgcgattgaaaaaagattatggcgatattccattatacattaccgaaaacggtgctgcatacaaagatcgcgtcaacgaacaaggtgaagtagaagatgatgagcgagttgcttatatacgagagcatttaatcgcttgccaccgcgcgattgaacaaggcgtcaatttaaaaggatattatgtattttcgctgttcgataattttgagtgggcatttggatatgataagcgctttgggattgtatacgtggattatgaaacgctagagcgcatcccgaaaaagagtgcattatggtataaggaaacgattataaacaacggattgaaagcagaaaaagataaaagatctcatcaccatcaccatcactaa

SEQ ID NO: 148 - DNA, 1386 bp, Artificial Sequence
  Derived by Lab Evolution
atgcttcagtttccgaaagattttatttggggagctgcaacttcatcgtatcaaattgaaggaacagcgactggagaagataaaatttactcgatctgggatcacttttcccgcattcctggcaaaatagcgaatggggataatggcgatattgcaattgatcattacaatcgttatgttgaagacatcgcattaatgaaagcgcttcatttgaaagcgtatcgattttcgactagttgggcgagactttattgtgaaacgccagggaagtttaacgaaaaaggtttagatttttataagcgtcttgtaaatgagctgctagagaacggtatcgagccaatgttgaccatttatcattgggatatgccacaagctcttcaagagaaaggtggctgggaaaatcgtgatatcgttcaatacttccaagaatacgctgctttcctttacgagaatcttggggatgtcgtgaaaaaatggattacgcataatgagccgtgggttgtcacctatttaggatatgggaatggcgaacatgccccagggattcaaaactttacatcatttttaaaagcagcacatcatgttcttctctcacacggggaagcggtaaaagcgtttcgagcaatcggtccgaaagatggggaagttggtattagtttgaatttgacacctggatatgcggttgatccgaaagatgaaaaagcagttgatgccgctcgaaaatgggacggctttaagaatcgttggtttttagatcctgtatttaagggacaatatccagcagatatgttagaagtgtataaagattatttaccagacgtttacaaagagggagatttacaaacgattcagcaaccgatcgactttttcggaattaactattatactacagcaacattaaaagattggaaaaaaggtgaccgtgaaccgatcgtatttgaacatgtgagcacaggaagacctgtgacggatatgaattgggaagtgaatccaaacggtttgtttgatttaatggtgcgattgaaaaaagattatggcgatattccattatacattaccgaaaacggtgctgcatacaaagatcgcgtcaacgaacaaggtgaagtagaagatgatgagcgagttgcttatatacgagagcatttaatcgcttgccaccgcgcgattgaacaaggcgtcaatttaaaaggatattattattggtcgctgttcgataattttgagtgggcatttggatatgataagcgctttgggattgtatacgtggattatgaaacgctagagcgcatcccgaaaaagagtgcattatggtataaggaaacgattataaacaacggattgaaagcagaaaaagataaaagatctcatcaccatcaccatcactaa

SEQ ID NO: 149 - DNA, 1386 bp, Artificial Sequence
  Derived by Lab Evolution
atgcttcagtttccgaaagattttatttggggagctgcaacttcatcgtatcaaattgaaggaacagcgactggagaagataaaatttactcgatctgggatcacttttcccgcattcctggcaaaatagcgaatggggataatggcgatattgcaattgatcattacaatcgttatgttgaagacatcgcattaatgaaagcgcttcatttgaaagcgtatcgattttcgactagttgggcgagactttattgtgaaacgccagggaagtttaacgaaaaaggtttagatttttataagcgtcttgtaaatgagctgctagagaacggtatcgagccaatgttgaccatttatcattgggatatgccacaagctcttcaagagaaaggtggctgggaaaatcgtgatatcgttcaatacttccaagaatacgctgctttcctttacgagaatcttggggatgtcgtgaaaaaatggattacgcataatgagccgtgggttgtcacctatttaggatatgggaatggcgaacatgccccagggattcaaaactttacatcatttttaaaagcagcacatcatgttcttctctcacacggggaagcggtaaaagcgtttcgagcaatcggtccgaaagatggggaagttggtattagtttgaatttgacacctggatatgcggttgatccgaaagatgaaaaagcagttgatgccgctcgaaaatgggacggctttaagaatcgttggtttttagatcctgtatttaagggacaatatccagcagatatgttagaagtgtataaagattatttaccagacgtttacaaagagggagatttacaaacgattcagcaaccgatcgactttttcggagttaactattatactacagcaacattaaaagattggaaaaaaggtgaccgtgaaccgatcgtatttgaacatgtgagcacaggaagacctgtgacggatatgaattgggaagtgaatccaaacggtttgtttgatttaatggtgcgattgaaaaaagattatggcgatattccattatacattaccgaaaacggtgctgcatacaaagatcgcgtcaacgaacaaggtgaagtagaagatgatgagcgagttgcttatatacgagagcatttaatcgcttgccaccgcgcgattgaacaaggcgtcaatttaaaaggatattatgtattttcgctgttcgataattttgagtgggcatttggatatgataagcgctttgggattgtatacgtggattatgaaacgctagagcgcatcccgaaaaagagtgcattatggtataaggaaacgattataaacaacggattgaaagcagaaaaagataaaagatctcatcaccatcaccatcactaa

SEQ ID NO: 150 - DNA, 1386 bp, Artificial Sequence
  Derived by Lab Evolution
atgcttcagtttccgaaagattttatttggggagctgcaacttcatcgtatcaaattgaaggaacagcgactggagaagataaaatttactcgatctgggatcacttttcccgcattcctggcaaaatagcgaatggggataatggcgatattgcaattgatcattacaatcgttatgttgaagacatcgcattaatgaaagcgcttcatttgaaagcgtatcgattttcgactagttgggcgagactttattgtgaaacgccagggaagtttaacgaaaaaggtttagatttttataagcgtcttgtaaatgagctgctagagaacggtatcgagccaatgttgaccatttatcattgggatatgccacaagctcttcaagagaaaggtggctgggaaaatcgtgatatcgttcaatacttccaagaatacgctgctttcctttacgagaatcttgggaatgtcgtgaaaaaatggattacgcataatgagccgtgggttgtcacctatttaggatatgggaatggcgaacatgccccagggattcaaaactttacatcatttttaaaagcagcacatcatgttcttctctcacacggggaagcggtaaaagcgtttcgagcaatcggtccgaaagatggggaagttggtattagtttgaatttgacacctggatatgcggttgatccgaaagatgaaaaagcagttgatgccgctcgaaaatgggacggctttaagaatcgttggtttttagatcctgtatttaagggacaatatccagcagatatgttagaagtgtataaagattatttaccagacgtttacaaagagggagatttacaaacgattcagcaaccgatcgactttttcggagttaactattattcaacagcaacattaaaagattggaaaaaaggtgaccgtgaaccgatcgtatttgaacatgtgagcacaggaagacctgtgacggatatgaattgggaagtgaatccaaacggtttgtttgatttaatggtgcgattgaaaaaagattatggcgatattccattatacattaccgaaaacggtgctgcatacaaagatcgcgtcaacgaacaaggtgaagtagaagatgatgagcgagttgcttatatacgagagcatttaatcgcttgccaccgcgcgattgaacaaggcgtcaatttaaaaggatattttgtattttcgctgttcgataattttgagtgggcatttggatatgataagcgctttgggattgtatacgtggattatgaaacgctagagcgcatcccgaaaaagagtgcattatggtataaggaaacgattataaacaacggattgaaagcagaaaaagataaaagatctcatcaccatcaccatcactaa

SEQ ID NO: 151 - DNA, 1386 bp, Artificial Sequence
  Derived by Lab Evolution
atgcttcagtttccgaaagattttatttggggagctgcaacttcatcgtatcaaattgaaggaacagcgactggagaagataaaatttactcgatctgggatcacttttcccgcattcctggcaaaatagcgaatggggataatggcgatattgcaattgatcattacaatcgttatgttgaagacatcgcattaatgaaagcgcttcatttgaaagcgtatcgattttcgactagttgggcgagactttattgtgaaacgccagggaagtttaacgaaaaaggtttagatttttataagcgtcttgtaaatgagctgctagagaacggtatcgagccaatgttgaccatttatcattgggatatgccacaagctcttcaagagaaaggtggctgggaaaatcgtgatatcgttcaatacttccaagaatacgctgctttcctttacgagaatcttggggatgtcgtgaaaaaatggattacgcataatgagccgtgggttgtcacctatttaggatatgggaatggcgaacatgccccagggattcaaaactttacatcatttttaaaagcagcacatcatgttcttctctcacacggggaagcggtaaaagcgtttcgagcaatcggtccgaaagatggggaagttggtattagtttgaatttgacacctggatatgcggttgatccgaaagatgaaaaagcagttgatgccgctcgaaaatgggacggctttatgaatcgttggtttttagatcctgtatttaagggacaatatccagcagatatgttagaagtgtataaagattatttaccagacgtttacaaagagggagatttacaaacgattcagcaaccgatcgactttttcggaattaactattatactacagcaacattaaaagattggaaaaaaggtgaccgtgaaccgatcgtatttgaacatgtgagcacaggaagacctgtgacggatatgaattgggaagtgaatccaaacggtttgtttgatttaatggtgcgattgaaaaaagattatggcgatattccattatacattaccgaaaacggtgctgcatacaaagatcgcgtcaacgaacaaggtgaagtagaagatgatgagcgagttgcttatatacgagagcatttaatcgcttgccaccgcgcgattgaacaaggcgtcaatttaaaaggatattttgtattttcgctgttcgataattttgagtgggcatttggatatgataagcgctttgggattgtatacgtggattatgaaacgctagagcgcatcccgaaaaagagtgcattatggtataaggaaacgattataaacaacggattgaaagcagaaaaagataaaagatctcatcaccatcaccatcactaa

SEQ ID NO: 152 - DNA, 1386 bp, Artificial Sequence
  Derived by Lab Evolution
atgcttcagtttccgaaagattttatttggggagctgcaacttcatcgtatcaaattgaaggaacagcgactggagaagataaaatttactcgatctgggatcacttttcccgcattcctggcaaaatagcgaatggggataatggcgatattgcaattgatcattacaatcgttatgttgaagacatcgcattaatgaaagcgcttcatttgaaagcgtatcgattttcgactagttgggcgagactttattgtgaaacgccagggaagtttaacgaaaaaggtttagatttttataagcgtcttgtaaatgagctgctagagaacggtatcgagccaatgttgaccatttatcattgggatatgccacaagctcttcaagagaaaggtggctgggaaaatcgtgatatcgttcaatacttccaagaatacgctgctttcctttacgagaatcttggggatgtcgtgaaaaaatggattacgcataatgagccgtgggttgtcacctatttaggatatgggaatggcgaacatgccccagggattcaaaactttacatcatttttaaaagcagcacatcatgttcttctctcacacggggaagcggtaaaagcgtttcgagcaatcggtccgaaagatggggaagttggtattagtttgaatttgacacctggatatgcggttgatccgaaagatgaaaaagcagttgatgccgctcgaaaatgggacggctttatgaatcgttggtttttagatcctgtatttaagggacaatatccagcagatatgttagaagtgtataaagattatttaccagacgtttacaaagagggagatttacaaacgattcagcaaccgatcgactttttcggaattaactattatactacagcaacattaaaagattggaaaaaaggtgaccgtgaaccgatcgtatttgaacatgtgagcacaggaagacctgtgacggatatgaattgggaagtgaatccaaacggtttgtttgatttaatggtgcgattgaaaaaagattatggcgatattccattatacattaccgaaaacggtgctgcatacaaagatcgcgtcaacgaacaaggtgaagtagaagatgatgagcgagttgcttatatacgagagcatttaatcgcttgccaccgcgcgattgaacaaggcgtcaatttaaaaggatatttttattggtcgctgttcgataattttgagtgggcatttggatatgataagcgctttgggattgtatacgtggattatgaaacgctagagcgcatcccgaaaaagagtgcattatggtataaggaaacgattataaacaacggattgaaagcagaaaaagataaaagatctcatcaccatcaccatcactaa

SEQ ID NO: 153 - DNA, 1386 bp, Artificial Sequence
  Derived by Lab Evolution
atgcttcagtttccgaaagattttatttggggagctgcaacttcatcgtatcaaattgaaggaacagcgactggagaagataaaatttactcgatctgggatcacttttcccgcattcctggcaaaatagcgaatggggataatggcgatattgcaattgatcattacaatcgttatgttgaagacatcgcattaatgaaagcgcttcatttgaaagcgtatcgattttcgactagttgggcgagactttattgtgaaacgccagggaagtttaacgaaaaaggtttagatttttataagcgtcttgtaaatgagctgctagagaacggtatcgagccaatgttgaccatttatcattgggatatgccacaagctcttcaagagaaaggtggctgggaaaatcgtgatatcgttcaatacttccaagaatacgctgctttcctttacgagaatcttggggatgtcgtgaaaaaatggattacgcataatgagccgtgggttgtcacctatttaggatatgggaatggcgaacatgccccagggattcaaaactttacatcatttttaaaagcagcacatcatgttcttctctcacacggggaagcggtaaaagcgtttcgagcaatcggtccgaaagatggggaagttggtattagtttgaatttgacacctggatatgcggttgatccgaaagatgaaaaagcagttgatgccgctcgaaaatgggacggctttatgaatcgttggtttttagatcctgtatttaagggacaatatccagcagatatgttagaagtgtataaagattatttaccagacgtttacaaagagggagatttacaaacgattcagcaaccgatcgactttttcggagttaactattatactacagcaacattaaaagattggaaaaaaggtgaccgtgaaccgatcgtatttgaacatgtgagcacaggaagacctgtgacggatatgaattgggaagtgaatccaaacggtttgtttgatttaatggtgcgattgaaaaaagattatggcgatattccattatacattaccgaaaacggtgctgcatacaaagatcgcgtcaacgaacaaggtgaagtagaagatgatgagcgagttgcttatatacgagagcatttaatcgcttgccaccgcgcgattgaacaaggcgtcaatttaaaaggatattatgtattttcgctgttcgataattttgagtgggcatttggatatgataagcgctttgggattgtatacgtggattatgaaacgctagagcgcatcccgaaaaagagtgcattatggtataaggaaacgattataaacaacggattgaaagcagaaaaagataaaagatctcatcaccatcaccatcactaa

SEQ ID NO: 154 - DNA, 1386 bp, Artificial Sequence
  Derived by Lab Evolution
atgcttcagtttccgaaagattttatttggggagctgcaacttcatcgtatcaaattgaaggaacagcgactggagaagataaaatttactcgatctgggatcacttttcccgcattcctggcaaaatagcgaatggggataatggcgatattgcaattgatcattacaatcgttatgttgaagacatcgcattaatgaaagcgcttcatttgaaagcgtatcgattttcgactagttgggcgagactttattgtgaaacgccagggaagtttaacgaaaaaggtttagatttttataagcgtcttgtaaatgagctgctagagaacggtatcgagccaatgttgaccatttatcattgggatatgccacaagctcttcaagagaaaggtggctgggaaaatcgtgatatcgttcaatacttccaagaatacgctgctttcctttacgagaatcttggggatgtcgtgaaaaaatggattacgcataatgagccgtgggttgtcacctatttaggatatgggaatggcgaacatgccccagggattcaaaactttacatcatttttaaaagcagcacatcatgttcttctctcacacggggaagcggtaaaagcgtttcgagcaatcggtccgaaagatggggaagttggtattacgttgaatttgacacctggatatgcggttgatccgaaagatgaaaaagcagttgatgccgctcgaaaatgggacggctttcataatcgttggtttttagatcctgtatttaagggacaatatccagcagatatgttagaagtgtataaagattatttaccagacgtttacaaagagggagatttacaaacgattcagcaaccgatcgactttttcggaattaactattatactacagcaacattaaaagattggaaaaaaggtgaccgtgaaccgatcgtatttgaacatgtgagcacaggaagacctgtgacggatatgaattgggaagtgaatccaaacggtttgtttgatttaatggtgcgattgaaaaaagattatggcgatattccattatacattaccgaaaacggtgctgcatacaaagatcgcgtcaacgaacaaggtgaagtagaagatgatgagcgagttgcttatatacgagagcatttaatcgcttgccaccgcgcgattgaacaaggcgtcaatttaaaaggatattttgtattttcgctgttcgataattttgagtgggcatttggatatgataagcgctttgggattgtatacgtggattatgaaacgctagagcgcatcccgaaaaagagtgcattatggtataaggaaacgattataaacaacggattgaaagcagaaaaagataaaagatctcatcaccatcaccatcactaa

SEQ ID NO: 155 - DNA, 1386 bp, Artificial Sequence
  Derived by Lab Evolution
atgcttcagtttccgaaagattttatttggggagctgcaacttcatcgtatcaaattgaaggaacagcgactggagaagataaaatttactcgatctgggatcacttttcccgcattcctggcaaaatagcgaatggggataatggcgatattgcaattgatcattacaatcgttatgttgaagacatcgcattaatgaaagcgcttcatttgaaagcgtatcgattttcgactagttgggcgagactttattgtgaaacgccagggaagtttaacgaaaaaggtttagatttttataagcgtcttgtaaatgagctgctagagaacggtatcgagccaatgttgaccatttatcattgggatatgccacaagctcttcaagagaaaggtggctgggaaaatcgtgatatcgttcaatacttccaagaatacgctgctttcctttacgagaatcttggggatgtcgtgaaaaaatggattacgcataatgagccgtgggttgtcacctatttaggatatgggaatggcgaacatgccccagggattcaaaactttacatcatttttaaaagcagcacatcatgttcttctctcacacggggaagcggtaaaagcgtttcgagcaatcggtccgaaagatggggaagttggtattacgttgaatttgacacctggatatgcggttgatccgaaagatgaaaaagcagttgatgccgctcgaaaatgggacggctttaagaatcgttggtttttagatcctgtatttaagggacaatatccagcagatatgttagaagtgtataaagattatttaccagacgtttacaaagagggagatttacaaacgattcagcaaccgatcgactttttcggaattaactattatactacagcaacattaaaagattggaaaaaaggtgaccgtgaaccgatcgtatttgaacatgtgagcacaggaagacctgtgacggatatgaattgggaagtgaatccaaacggtttgtttgatttaatggtgcgattgaaaaaagattatggcgatattccattatacattaccgaaaacggtgctgcatacaaagatcgcgtcaacgaacaaggtgaagtagaagatgatgagcgagttgcttatatacgagagcatttaatcgcttgccaccgcgcgattgaacaaggcgtcaatttaaaaggatattttgtattttcgctgttcgataattttgagtgggcatttggatatgataagcgctttgggattgtatacgtggattatgaaacgctagagcgcatcccgaaaaagagtgcattatggtataaggaaacgattataaacaacggattgaaagcagaaaaagataaaagatctcatcaccatcaccatcactaa

SEQ ID NO: 156 - DNA, 1386 bp, Artificial Sequence
  Derived by Lab Evolution
atgcttcagtttccgaaagattttatttggggagctgcaacttcatcgtatcaaattgaaggaacagcgactggagaagataaaatttactcgatctgggatcacttttcccgcattcctggcaaaatagcgaatggggataatggcgatattgcaattgatcattacaatcgttatgttgaagacatcgcattaatgaaagcgcttcatttgaaagcgtatcgattttcgactagttgggcgagactttattgtgaaacgccagggaagtttaacgaaaaaggtttagatttttataagcgtcttgtaaatgagctgctagagaacggtatcgagccaatgttgaccatttatcattgggatatgccacaagctcttcaagagaaaggtggctgggaaaatcgtgatatcgttcaatacttccaagaatacgctgctttcctttacgagaatcttggggatgtcgtgaaaaaatggattacgcataatgagccgtgggttgtcacctatttaggatatgggaatggcgaacatgccccagggattcaaaactttacatcatttttaaaagcagcacatcatgttcttctctcacacggggaagcggtaaaagcgtttcgagcaatcggtccgaaagatggggaagttggtattacgttgaatttgacacctggatatgcggttgatccgaaagatgaaaaagcagttgatgccgctcgaaaatgggacggctttaagaatcgttggtttttagatcctgtatttaagggacaatatccagcagatatgttagaagtgtataaagattatttaccagacgtttacaaagagggagatttacaaacgattcagcaaccgatcgactttttcggaattaactattatactacagcaacattaaaagattggaaaaaaggtgaccgtgaaccgatcgtatttgaacatgtgagcacaggaagacctgtgacggatatgaattgggaagtgaatccaaacggtttgtttgatttaatggtgcgattgaaaaaagattatggcgatattccattatacattaccgaaaacggtgctgcatacaaagatcgcgtcaacgaacaaggtgaagtagaagatgatgagcgagttgcttatatacgagagcatttaatcgcttgccaccgcgcgattgaacaaggcgtcaatttaaaaggatattatgtattttcgctgttcgataattttgagtgggcatttggatatgataagcgctttgggattgtatacgtggattatgaaacgctagagcgcatcccgaaaaagagtgcattatggtataaggaaacgattataaacaacggattgaaagcagaaaaagataaaagatctcatcaccatcaccatcactaa

SEQ ID NO: 157 - DNA, 1386 bp, Artificial Sequence
  Derived by Lab Evolution
atgcttcagtttccgaaagattttatttggggagctgcaacttcatcgtatcaaattgaaggaacagcgactggagaagataaaatttactcgatctgggatcacttttcccgcattcctggcaaaatagcgaatggggataatggcgatattgcaattgatcattacaatcgttatgttgaagacatcgcattaatgaaagcgcttcatttgaaagcgtatcgattttcgactagttgggcgagactttattgtgaaacgccagggaagtttaacgaaaaaggtttagatttttataagcgtcttgtaaatgagctgctagagaacggtatcgagccaatgttgaccatttatcattgggatatgccacaagctcttcaagagaaaggtggctgggaaaatcgtgatatcgttcaatacttccaagaatacgctgctttcctttacgagaatcttggggatgtcgtgaaaaaatggattacgcataatgagccgtgggttgtcacctatttaggatatgggaatggcgaacatgccccagggattcaaaactttacatcatttttaaaagcagcacatcatgttcttctctcacacggggaagcggtaaaagcgtttcgagcaatcggtccgaaagatggggaaattggtattgcgttgaatttgacacctggatatgcggttgatccgaaagatgaaaaagcagttgatgccgctcgaaaatgggacggctttaagaatcgttggtttttagatcctgtatttaagggacaatatccagcagatatgttagaagtgtataaagattatttaccagacgtttacaaagagggagatttacaaacgattcagcaaccgatcgactttttcggaattaactattatactacagcaacattaaaagattggaaaaaaggtgaccgtgaaccgatcgtatttgaacatgtgagcacaggaagacctgtgacggatatgaattgggaagtgaatccaaacggtttgtttgatttaatggtgcgattgaaaaaagattatggcgatattccattatacattaccgaaaacggtgctgcatacaaagatcgcgtcaacgaacaaggtgaagtagaagatgatgagcgagttgcttatatacgagagcatttaatcgcttgccaccgcgcgattgaacaaggcgtcaatttaaaaggatatttttattggtcgctgttcgataattttgagtgggcatttggatatgataagcgctttgggattgtatacgtggattatgaaacgctagagcgcatcccgaaaaagagtgcattatggtataaggaaacgattataaacaacggattgaaagcagaaaaagataaaagatctcatcaccatcaccatcactaa

SEQ ID NO: 158 - DNA, 1386 bp, Artificial Sequence
  Derived by Lab Evolution
atgcttcagtttccgaaagattttatttggggagctgcaacttcatcgtatcaaattgaaggaacagcgactggagaagataaaatttactcgatctgggatcacttttcccgcattcctggcaaaatagcgaatggggataatggcgatattgcaattgatcattacaatcgttatgttgaagacatcgcattaatgaaagcgcttcatttgaaagcgtatcgattttcgactagttgggcgagactttattgtgaaacgccagggaagtttaacgaaaaaggtttagatttttataagcgtcttgtaaatgagctgctagagaacggtatcgagccaatgttgaccatttatcattgggatatgccacaagctcttcaagagaaaggtggctgggaaaatcgtgatatcgttcaatacttccaagaatacgctgctttcctttacgagaatcttggggatgtcgtgaaaaaatggattacgcataatgagccgtgggttgtcacctatttaggatatgggaatggcgaacatgccccagggattcaaaactttacatcatttttaaaagcagcacatcatgttcttctctcacacggggaagcggtaaaagcgtttcgagcaatcggtccgaaagatggggaaattggtattgcgttgaatttgacacctggatatgcggttgatccgaaagatgaaaaagcagttgatgccgctcgaaaatgggacggctttaagaatcgttggtttttagatcctgtatttaagggacaatatccagcagatatgttagaagtgtataaagattatttaccagacgtttacaaagagggagatttacaaacgattcagcaaccgatcgactttttcggaattaactattatactacagcaacattaaaagattggaaaaaaggtgaccgtgaaccgatcgtatttgaacatgtgagcacaggaagacctgtgacggatatgaattgggaagtgaatccaaacggtttgtttgatttaatggtgcgattgaaaaaagattatggcgatattccattatacattaccgaaaacggtgctgcatacaaagatcgcgtcaacgaacaaggtgaagtagaagatgatgagcgagttgcttatatacgagagcatttaatcgcttgccaccgcgcgattgaacaaggcgtcaatttaaaaggatattattattggtcgctgttcgataattttgagtgggcatttggatatgataagcgctttgggattgtatacgtggattatgaaacgctagagcgcatcccgaaaaagagtgcattatggtataaggaaacgattataaacaacggattgaaagcagaaaaagataaaagatctcatcaccatcaccatcactaa

SEQ ID NO: 159 - DNA, 1386 bp, Artificial Sequence
  Derived by Lab Evolution
atgcttcagtttccgaaagattttatttggggagctgcaacttcatcgtatcaaattgaaggaacagcgactggagaagataaaatttactcgatctgggatcacttttcccgcattcctggcaaaatagcgaatggggataatggcgatattgcaattgatcattacaatcgttatgttgaagacatcgcattaatgaaagcgcttcatttgaaagcgtatcgattttcgactagttgggcgagactttattgtgaaacgccagggaagtttaacgaaaaaggtttagatttttataagcgtcttgtaaatgagctgctagagaacggtatcgagccaatgttgaccatttatcattgggatatgccacaagctcttcaagagaaaggtggctgggaaaatcgtgatatcgttcaatacttccaagaatacgctgctttcctttacgagaatcttggggatgtcgtgaaaaaatggattacgcataatgagccgtgggttgtcacctatttaggatatgggaatggcgaacatgccccagggattcaaaactttacatcatttttaaaagcagcacatcatgttcttctctcacacggggaagcggtaaaagcgtttcgagcaatcggtccgaaagatggggaaattggtattgcgttgaatttgacacctggatatgcggttgatccgaaagatgaaaaagcagttgatgccgctcgaaaatgggacggctttaagaatcgttggtttttagatcctgtatttaagggacaatatccagcagatatgttagaagtgtataaagattatttaccagacgtttacaaagagggagatttacaaacgattcagcaaccgatcgactttttcggagttaactattatactacagcaacattaaaagattggaaaaaaggtgaccgtgaaccgatcgtatttgaacatgtgagcacaggaagacctgtgacggatatgaattgggaagtgaatccaaacggtttgtttgatttaatggtgcgattgaaaaaagattatggcgatattccattatacattaccgaaaacggtgctgcatacaaagatcgcgtcaacgaacaaggtgaagtagaagatgatgagcgagttgcttatatacgagagcatttaatcgcttgccaccgcgcgattgaacaaggcgtcaatttaaaaggatattattattggtcgctgttcgataattttgagtgggcatttggatatgataagcgctttgggattgtatacgtggattatgaaacgctagagcgcatcccgaaaaagagtgcattatggtataaggaaacgattataaacaacggattgaaagcagaaaaagataaaagatctcatcaccatcaccatcactaa

SEQ ID NO: 160 - DNA, 1386 bp, Artificial Sequence
  Derived by Lab Evolution
atgcttcagtttccgaaagattttatttggggagctgcaacttcatcgtatcaaattgaaggaacagcgactggagaagataaaatttactcgatctgggatcacttttcccgcattcctggcaaaatagcgaatggggataatggcgatattgcaattgatcattacaatcgttatgttgaagacatcgcattaatgaaagcgcttcatttgaaagcgtatcgattttcgactagttgggcgagactttattgtgaaacgccagggaagtttaacgaaaaaggtttagatttttataagcgtcttgtaaatgagctgctagagaacggtatcgagccaatgttgaccatttatcattgggatatgccacaagctcttcaagagaaaggtggctgggaaaatcgtgatatcgttcaatacttccaagaatacgctgctttcctttacgagaatcttggggatgtcgtgaaaaaatggattacgcataatgagccgtgggttgtcacctatttaggatatgggaatggcgaacatgccccagggattcaaaactttacatcatttttaaaagcagcacatcatgttcttctctcacacggggaagcggtaaaagcgtttcgagcaatcggtccgaaagatggggaaattggtattgcgttgaatttgacacctggatatgcggttgatccgaaagatgaaaaagcagttgatgccgctcgaaaatgggacggctttatgaatcgttggtttttagatcctgtatttaagggacaatatccagcagatatgttagaagtgtataaagattatttaccagacgtttacaaagagggagatttacaaacgattcagcaaccgatcgactttttcggaattaactattatactacagcaacattaaaagattggaaaaaaggtgaccgtgaaccgatcgtatttgaacatgtgagcacaggaagacctgtgacggatatgaattgggaagtgaatccaaacggtttgtttgatttaatggtgcgattgaaaaaagattatggcgatattccattatacattaccgaaaacggtgctgcatacaaagatcgcgtcaacgaacaaggtgaagtagaagatgatgagcgagttgcttatatacgagagcatttaatcgcttgccaccgcgcgattgaacaaggcgtcaatttaaaaggatattttgtattttcgctgttcgataattttgagtgggcatttggatatgataagcgctttgggattgtatacgtggattatgaaacgctagagcgcatcccgaaaaagagtgcattatggtataaggaaacgattataaacaacggattgaaagcagaaaaagataaaagatctcatcaccatcaccatcactaa

SEQ ID NO: 161 - DNA, 1386 bp, Artificial Sequence
  Derived by Lab Evolution
atgcttcagtttccgaaagattttatttggggagctgcaacttcatcgtatcaaattgaaggaacagcgactggagaagataaaatttactcgatctgggatcacttttcccgcattcctggcaaaatagcgaatggggataatggcgatattgcaattgatcattacaatcgttatgttgaagacatcgcattaatgaaagcgcttcatttgaaagcgtatcgattttcgactagttgggcgagactttattgtgaaacgccagggaagtttaacgaaaaaggtttagatttttataagcgtcttgtaaatgagctgctagagaacggtatcgagccaatgttgaccatttatcattgggatatgccacaagctcttcaagagaaaggtggctgggaaaatcgtgatatcgttcaatacttccaagaatacgctgctttcctttacgagaatcttggggatgtcgtgaaaaaatggattacgcataatgagccgtgggttgtcacctatttaggatatgggaatggcgaacatgccccagggattcaaaactttacatcatttttaaaagcagcacatcatgttcttctctcacacggggaagcggtaaaagcgtttcgagcaatcggtccgaaagatggggaaattggtattgcgttgaatttgacacctggatatgcggttgatccgaaagatgaaaaagcagttgatgccgctcgaaaatgggacggctttatgaatcgttggtttttagatcctgtatttaagggacaatatccagcagatatgttagaagtgtataaagattatttaccagacgtttacaaagagggagatttacaaacgattcagcaaccgatcgactttttcggagttaactattatactacagcaacattaaaagattggaaaaaaggtgaccgtgaaccgatcgtatttgaacatgtgagcacaggaagacctgtgacggatatgaattgggaagtgaatccaaacggtttgtttgatttaatggtgcgattgaaaaaagattatggcgatattccattatacattaccgaaaacggtgctgcatacaaagatcgcgtcaacgaacaaggtgaagtagaagatgatgagcgagttgcttatatacgagagcatttaatcgcttgccaccgcgcgattgaacaaggcgtcaatttaaaaggatattatgtattttcgctgttcgataattttgagtgggcatttggatatgataagcgctttgggattgtatacgtggattatgaaacgctagagcgcatcccgaaaaagagtgcattatggtataaggaaacgattataaacaacggattgaaagcagaaaaagataaaagatctcatcaccatcaccatcactaa

SEQ ID NO: 162 - DNA, 1386 bp, Artificial Sequence
  Derived by Lab Evolution
atgcttcagtttccgaaagattttatttggggagctgcaacttcatcgtatcaaattgaaggaacagcgactggagaagataaaatttactcgatctgggatcacttttcccgcattcctggcaaaatagcgaatggggataatggcgatattgcaattgatcattacaatcgttatgttgaagacatcgcattaatgaaagcgcttcatttgaaagcgtatcgattttcgactagttgggcgagactttattgtgaaacgccagggaagtttaacgaaaaaggtttagatttttataagcgtcttgtaaatgagctgctagagaacggtatcgagccaatgttgaccatttatcattgggatatgccacaagctcttcaagagaaaggtggctgggaaaatcgtgatatcgttcaatacttccaagaatacgctgctttcctttacgagaatcttggggatgtcgtgaaaaaatggattacgcataatgagccgtgggttgtcacctatttaggatatgggaatggcgaacatgccccagggattcaaaactttacatcatttttaaaagcagcacatcatgttcttctctcacacggggaagcggtaaaagcgtttcgagcaatcggtccgaaagatggggaaattggtattagtttgaatttgacacctggatatgcggttgatccgaaagatgaaaaagcagttgatgccgctcgaaaatgggacggctttcataatcgttggtttttagatcctgtatttaagggacaatatccagcagatatgttagaagtgtataaagattatttaccagacgtttacaaagagggagatttacaaacgattcagcaaccgatcgactttttcggaattaactattatactacagcaacattaaaagattggaaaaaaggtgaccgtgaaccgatcgtatttgaacatgtgagcacaggaagacctgtgacggatatgaattgggaagtgaatccaaacggtttgtttgatttaatggtgcgattgaaaaaagattatggcgatattccattatacattaccgaaaacggtgctgcatacaaagatcgcgtcaacgaacaaggtgaagtagaagatgatgagcgagttgcttatatacgagagcatttaatcgcttgccaccgcgcgattgaacaaggcgtcaatttaaaaggatattattattggtcgctgttcgataattttgagtgggcatttggatatgataagcgctttgggattgtatacgtggattatgaaacgctagagcgcatcccgaaaaagagtgcattatggtataaggaaacgattataaacaacggattgaaagcagaaaaagataaaagatctcatcaccatcaccatcactaa

SEQ ID NO: 163 - DNA, 1386 bp, Artificial Sequence
  Derived by Lab Evolution
atgcttcagtttccgaaagattttatttggggagctgcaacttcatcgtatcaaattgaaggaacagcgactggagaagataaaatttactcgatctgggatcacttttcccgcattcctggcaaaatagcgaatggggataatggcgatattgcaattgatcattacaatcgttatgttgaagacatcgcattaatgaaagcgcttcatttgaaagcgtatcgattttcgactagttgggcgagactttattgtgaaacgccagggaagtttaacgaaaaaggtttagatttttataagcgtcttgtaaatgagctgctagagaacggtatcgagccaatgttgaccatttatcattgggatatgccacaagctcttcaagagaaaggtggctgggaaaatcgtgatatcgttcaatacttccaagaatacgctgctttcctttacgagaatcttggggatgtcgtgaaaaaatggattacgcataatgagccgtgggttgtcacctatttaggatatgggaatggcgaacatgccccagggattcaaaactttacatcatttttaaaagcagcacatcatgttcttctctcacacggggaagcggtaaaagcgtttcgagcaatcggtccgaaagatggggaaattggtattagtttgaatttgacacctggatatgcggttgatccgaaagatgaaaaagcagttgatgccgctcgaaaatgggacggctttaagaatcgttggtttttagatcctgtatttaagggacaatatccagcagatatgttagaagtgtataaagattatttaccagacgtttacaaagagggagatttacaaacgattcagcaaccgatcgactttttcggaattaactattatactacagcaacattaaaagattggaaaaaaggtgaccgtgaaccgatcgtatttgaacatgtgagcacaggaagacctgtgacggatatgaattgggaagtgaatccaaacggtttgtttgatttaatggtgcgattgaaaaaagattatggcgatattccattatacattaccgaaaacggtgctgcatacaaagatcgcgtcaacgaacaaggtgaagtagaagatgatgagcgagttgcttatatacgagagcatttaatcgcttgccaccgcgcgattgaacaaggcgtcaatttaaaaggatatttttattggtcgctgttcgataattttgagtgggcatttggatatgataagcgctttgggattgtatacgtggattatgaaacgctagagcgcatcccgaaaaagagtgcattatggtataaggaaacgattataaacaacggattgaaagcagaaaaagataaaagatctcatcaccatcaccatcactaa

SEQ ID NO: 164 - DNA, 1386 bp, Artificial Sequence
  Derived by Lab Evolution
atgcttcagtttccgaaagattttatttggggagctgcaacttcatcgtatcaaattgaaggaacagcgactggagaagataaaatttactcgatctgggatcacttttcccgcattcctggcaaaatagcgaatggggataatggcgatattgcaattgatcattacaatcgttatgttgaagacatcgcattaatgaaagcgcttcatttgaaagcgtatcgattttcgactagttgggcgagactttattgtgaaacgccagggaagtttaacgaaaaaggtttagatttttataagcgtcttgtaaatgagctgctagagaacggtatcgagccaatgttgaccatttatcattgggatatgccacaagctcttcaagagaaaggtggctgggaaaatcgtgatatcgttcaatacttccaagaatacgctgctttcctttacgagaatcttggggatgtcgtgaaaaaatggattacgcataatgagccgtgggttgtcacctatttaggatatgggaatggcgaacatgccccagggattcaaaactttacatcatttttaaaagcagcacatcatgttcttctctcacacggggaagcggtaaaagcgtttcgagcaatcggtccgaaagatggggaaattggtattagtttgaatttgacacctggatatgcggttgatccgaaagatgaaaaagcagttgatgccgctcgaaaatgggacggctttaagaatcgttggtttttagatcctgtatttaagggacaatatccagcagatatgttagaagtgtataaagattatttaccagacgtttacaaagagggagatttacaaacgattcagcaaccgatcgactttttcggaattaactattatactacagcaacattaaaagattggaaaaaaggtgaccgtgaaccgatcgtatttgaacatgtgagcacaggaagacctgtgacggatatgaattgggaagtgaatccaaacggtttgtttgatttaatggtgcgattgaaaaaagattatggcgatattccattatacattaccgaaaacggtgctgcatacaaagatcgcgtcaacgaacaaggtgaagtagaagatgatgagcgagttgcttatatacgagagcatttaatcgcttgccaccgcgcgattgaacaaggcgtcaatttaaaaggatattatgtattttcgctgttcgataattttgagtgggcatttggatatgataagcgctttgggattgtatacgtggattatgaaacgctagagcgcatcccgaaaaagagtgcattatggtataaggaaacgattataaacaacggattgaaagcagaaaaagataaaagatctcatcaccatcaccatcactaa

SEQ ID NO: 165 - DNA, 1386 bp, Artificial Sequence
  Derived by Lab Evolution
atgcttcagtttccgaaagattttatttggggagctgcaacttcatcgtatcaaattgaaggaacagcgactggagaagataaaatttactcgatctgggatcacttttcccgcattcctggcaaaatagcgaatggggataatggcgatattgcaattgatcattacaatcgttatgttgaagacatcgcattaatgaaagcgcttcatttgaaagcgtatcgattttcgactagttgggcgagactttattgtgaaacgccagggaagtttaacgaaaaaggtttagatttttataagcgtcttgtaaatgagctgctagagaacggtatcgagccaatgttgaccatttatcattgggatatgccacaagctcttcaagagaaaggtggctgggaaaatcgtgatatcgttcaatacttccaagaatacgctgctttcctttacgagaatcttggggatgtcgtgaaaaaatggattacgcataatgagccgtgggttgtcacctatttaggatatgggaatggcgaacatgccccagggattcaaaactttacatcatttttaaaagcagcacatcatgttcttctctcacacggggaagcggtaaaagcgtttcgagcaatcggtccgaaagatggggaaattggtattagtttgaatttgacacctggatatgcggttgatccgaaagatgaaaaagcagttgatgccgctcgaaaatgggacggctttaagaatcgttggtttttagatcctgtatttaagggacaatatccagcagatatgttagaagtgtataaagattatttaccagacgtttacaaagagggagatttacaaacgattcagcaaccgatcgactttttcggaattaactattatactacagcaacattaaaagattggaaaaaaggtgaccgtgaaccgatcgtatttgaacatgtgagcacaggaagacctgtgacggatatgaattgggaagtgaatccaaacggtttgtttgatttaatggtgcgattgaaaaaagattatggcgatattccattatacattaccgaaaacggtgctgcatacaaagatcgcgtcaacgaacaaggtgaagtagaagatgatgagcgagttgcttatatacgagagcatttaatcgcttgccaccgcgcgattgaacaaggcgtcaatttaaaaggatattattattggtcgctgttcgataattttgagtgggcatttggatatgataagcgctttgggattgtatacgtggattatgaaacgctagagcgcatcccgaaaaagagtgcattatggtataaggaaacgattataaacaacggattgaaagcagaaaaagataaaagatctcatcaccatcaccatcactaa

SEQ ID NO: 166 - DNA, 1386 bp, Artificial Sequence
  Derived by Lab Evolution
atgcttcagtttccgaaagattttatttggggagctgcaacttcatcgtatcaaattgaaggaacagcgactggagaagataaaatttactcgatctgggatcacttttcccgcattcctggcaaaatagcgaatggggataatggcgatattgcaattgatcattacaatcgttatgttgaagacatcgcattaatgaaagcgcttcatttgaaagcgtatcgattttcgactagttgggcgagactttattgtgaaacgccagggaagtttaacgaaaaaggtttagatttttataagcgtcttgtaaatgagctgctagagaacggtatcgagccaatgttgaccatttatcattgggatatgccacaagctcttcaagagaaaggtggctgggaaaatcgtgatatcgttcaatacttccaagaatacgctgctttcctttacgagaatcttggggatgtcgtgaaaaaatggattacgcataatgagccgtgggttgtcacctatttaggatatgggaatggcgaacatgccccagggattcaaaactttacatcatttttaaaagcagcacatcatgttcttctctcacacggggaagcggtaaaagcgtttcgagcaatcggtccgaaagatggggaaattggtattagtttgaatttgacacctggatatgcggttgatccgaaagatgaaaaagcagttgatgccgctcgaaaatgggacggctttaagaatcgttggtttttagatcctgtatttaagggacaatatccagcagatatgttagaagtgtataaagattatttaccagacgtttacaaagagggagatttacaaacgattcagcaaccgatcgactttttcggagttaactattatactacagcaacattaaaagattggaaaaaaggtgaccgtgaaccgatcgtatttgaacatgtgagcacaggaagacctgtgacggatatgaattgggaagtgaatccaaacggtttgtttgatttaatggtgcgattgaaaaaagattatggcgatattccattatacattaccgaaaacggtgctgcatacaaagatcgcgtcaacgaacaaggtgaagtagaagatgatgagcgagttgcttatatacgagagcatttaatcgcttgccaccgcgcgattgaacaaggcgtcaatttaaaaggatatttttattggtcgctgttcgataattttgagtgggcatttggatatgataagcgctttgggattgtatacgtggattatgaaacgctagagcgcatcccgaaaaagagtgcattatggtataaggaaacgattataaacaacggattgaaagcagaaaaagataaaagatctcatcaccatcaccatcactaa

SEQ ID NO: 167 - DNA, 1386 bp, Artificial Sequence
  Derived by Lab Evolution
atgcttcagtttccgaaagattttatttggggagctgcaacttcatcgtatcaaattgaaggaacagcgactggagaagataaaatttactcgatctgggatcacttttcccgcattcctggcaaaatagcgaatggggataatggcgatattgcaattgatcattacaatcgttatgttgaagacatcgcattaatgaaagcgcttcatttgaaagcgtatcgattttcgactagttgggcgagactttattgtgaaacgccagggaagtttaacgaaaaaggtttagatttttataagcgtcttgtaaatgagctgctagagaacggtatcgagccaatgttgaccatttatcattgggatatgccacaagctcttcaagagaaaggtggctgggaaaatcgtgatatcgttcaatacttccaagaatacgctgctttcctttacgagaatcttggggatgtcgtgaaaaaatggattacgcataatgagccgtgggttgtcacctatttaggatatgggaatggcgaacatgccccagggattcaaaactttacatcatttttaaaagcagcacatcatgttcttctctcacacggggaagcggtaaaagcgtttcgagcaatcggtccgaaagatggggaaattggtattagtttgaatttgacacctggatatgcggttgatccgaaagatgaaaaagcagttgatgccgctcgaaaatgggacggctttatgaatcgttggtttttagatcctgtatttaagggacaatatccagcagatatgttagaagtgtataaagattatttaccagacgtttacaaagagggagatttacaaacgattcagcaaccgatcgactttttcggaattaactattatactacagcaacattaaaagattggaaaaaaggtgaccgtgaaccgatcgtatttgaacatgtgagcacaggaagacctgtgacggatatgaattgggaagtgaatccaaacggtttgtttgatttaatggtgcgattgaaaaaagattatggcgatattccattatacattaccgaaaacggtgctgcatacaaagatcgcgtcaacgaacaaggtgaagtagaagatgatgagcgagttgcttatatacgagagcatttaatcgcttgccaccgcgcgattgaacaaggcgtcaatttaaaaggatattttgtattttcgctgttcgataattttgagtgggcatttggatatgataagcgctttgggattgtatacgtggattatgaaacgctagagcgcatcccgaaaaagagtgcattatggtataaggaaacgattataaacaacggattgaaagcagaaaaagataaaagatctcatcaccatcaccatcactaa

SEQ ID NO: 168 - DNA, 1386 bp, Artificial Sequence
  Derived by Lab Evolution
atgcttcagtttccgaaagattttatttggggagctgcaacttcatcgtatcaaattgaaggaacagcgactggagaagataaaatttactcgatctgggatcacttttcccgcattcctggcaaaatagcgaatggggataatggcgatattgcaattgatcattacaatcgttatgttgaagacatcgcattaatgaaagcgcttcatttgaaagcgtatcgattttcgactagttgggcgagactttattgtgaaacgccagggaagtttaacgaaaaaggtttagatttttataagcgtcttgtaaatgagctgctagagaacggtatcgagccaatgttgaccatttatcattgggatatgccacaagctcttcaagagaaaggtggctgggaaaatcgtgatatcgttcaatacttccaagaatacgctgctttcctttacgagaatcttggggatgtcgtgaaaaaatggattacgcataatgagccgtgggttgtcacctatttaggatatgggaatggcgaacatgccccagggattcaaaactttacatcatttttaaaagcagcacatcatgttcttctctcacacggggaagcggtaaaagcgtttcgagcaatcggtccgaaagatggggaaattggtattagtttgaatttgacacctggatatgcggttgatccgaaagatgaaaaagcagttgatgccgctcgaaaatgggacggctttatgaatcgttggtttttagatcctgtatttaagggacaatatccagcagatatgttagaagtgtataaagattatttaccagacgtttacaaagagggagatttacaaacgattcagcaaccgatcgactttttcggagttaactattatactacagcaacattaaaagattggaaaaaaggtgaccgtgaaccgatcgtatttgaacatgtgagcacaggaagacctgtgacggatatgaattgggaagtgaatccaaacggtttgtttgatttaatggtgcgattgaaaaaagattatggcgatattccattatacattaccgaaaacggtgctgcatacaaagatcgcgtcaacgaacaaggtgaagtagaagatgatgagcgagttgcttatatacgagagcatttaatcgcttgccaccgcgcgattgaacaaggcgtcaatttaaaaggatattttgtattttcgctgttcgataattttgagtgggcatttggatatgataagcgctttgggattgtatacgtggattatgaaacgctagagcgcatcccgaaaaagagtgcattatggtataaggaaacgattataaacaacggattgaaagcagaaaaagataaaagatctcatcaccatcaccatcactaa

SEQ ID NO: 169 - DNA, 1386 bp, Artificial Sequence
  Derived by Lab Evolution
atgcttcagtttccgaaagattttatttggggagctgcaacttcatcgtatcaaattgaaggaacagcgactggagaagataaaatttactcgatctgggatcacttttcccgcattcctggcaaaatagcgaatggggataatggcgatattgcaattgatcattacaatcgttatgttgaagacatcgcattaatgaaagcgcttcatttgaaagcgtatcgattttcgactagttgggcgagactttattgtgaaacgccagggaagtttaacgaaaaaggtttagatttttataagcgtcttgtaaatgagctgctagagaacggtatcgagccaatgttgaccatttatcattgggatatgccacaagctcttcaagagaaaggtggctgggaaaatcgtgatatcgttcaatacttccaagaatacgctgctttcctttacgagaatcttggggatgtcgtgaaaaaatggattacgcataatgagccgtgggttgtcacctatttaggatatgggaatggcgaacatgccccagggattcaaaactttacatcatttttaaaagcagcacatcatgttcttctctcacacggtgaagcggtaaaagcgtttcgagcaatcggtccgaaagatggggaaattggtattagtttgaatttgacacctggatatgcggttgatccgaaagatgaaaaagcagttgatgccgctcgaaaatgggacggctttatgaatcgttggtttttagatcctgtatttaagggacaatatccagcagatatgttagaagtgtataaagattatttaccagacgtttacaaagagggagatttacaaacgattcagcaaccgatcgactttttcggagttaactattatactacagcaacattaaaagattggaaaaaaggtgaccgtgaaccgatcgtatttgaacatgtgagcacaggaagacctgtgacggatatgaattgggaagtgaatccaaacggtttgtttgatttaatggtgcgattgaaaaaagattatggcgatattccattatacattaccgaaaacggtgctgcatacaaagatcgcgtcaacgaacaaggtgaagtagaagatgatgagcgagttgcttatatacgagagcatttaatcgcttgccaccgcgcgattgaacaaggcgtcaatttaaaaggatatttttattggtcgctgttcgataattttgagtgggcatttggatatgataagcgctttgggattgtatacgtggattatgaaacgctagagcgcatcccgaaaaagagtgcattatggtataaggaaacgattataaacaacggattgaaagcagaaaaagataaaagatctcatcaccatcaccatcactaa

SEQ ID NO: 170 - DNA, 1386 bp, Artificial Sequence
  Derived by Lab Evolution
atgcttcagtttccgaaagattttatttggggagctgcaacttcatcgtatcaaattgaaggaacagcgactggagaagataaaatttactcgatctgggatcacttttcccgcattcctggcaaaatagcgaatggggataatggcgatattgcaattgatcattacaatcgttatgttgaagacatcgcattaatgaaagcgcttcatttgaaagcgtatcgattttcgactagttgggcgagactttattgtgaaacgccagggaagtttaacgaaaaaggtttagatttttataagcgtcttgtaaatgagctgctagagaacggtatcgagccaatgttgaccatttatcattgggatatgccacaagctcttcaagagaaaggtggctgggaaaatcgtgatatcgttcaatacttccaagaatacgctgctttcctttacgagaatcttggggatgtcgtgaaaaaatggattacgcataatgagccgtgggttgtcacctatttaggatatgggaatggcgaacatgccccagggattcaaaactttacatcatttttaaaagcagcacatcatgttcttctctcacacggggaagcggtaaaagcgtttcgagcaatcggtccgaaagatggggaaattggtattacgttgaatttgacacctggatatgcggttgatccgaaagatgaaaaagcagttgatgccgctcgaaaatgggacggctttaagaatcgttggtttttagatcctgtatttaagggacaatatccagcagatatgttagaagtgtataaagattatttaccagacgtttacaaagagggagatttacaaacgattcagcaaccgatcgactttttcggaattaactattatactacagcaacattaaaagattggaaaaaaggtgaccgtgaaccgatcgtatttgaacatgtgagcacaggaagacctgtgacggatatgaattgggaagtgaatccaaacggtttgtttgatttaatggtgcgattgaaaaaagattatggcgatattccattatacattaccgaaaacggtgctgcatacaaagatcgcgtcaacgaacaaggtgaagtagaagatgatgagcgagttgcttatatacgagagcatttaatcgcttgccaccgcgcgattgaacaaggcgtcaatttaaaaggatattatgtattttcgctgttcgataattttgagtgggcatttggatatgataagcgctttgggattgtatacgtggattatgaaacgctagagcgcatcccgaaaaagagtgcattatggtataaggaaacgattataaacaacggattgaaagcagaaaaagataaaagatctcatcaccatcaccatcactaa

SEQ ID NO: 171 - DNA, 1386 bp, Artificial Sequence
  Derived by Lab Evolution
atgcttcagtttccgaaagattttatttggggagctgcaacttcatcgtatcaaattgaaggaacagcgactggagaagataaaatttactcgatctgggatcacttttcccgcattcctggcaaaatagcgaatggggataatggcgatattgcaattgatcattacaatcgttatgttgaagacatcgcattaatgaaagcgcttcatttgaaagcgtatcgattttcgactagttgggcgagactttattgtgaaacgccagggaagtttaacgaaaaaggtttagatttttataagcgtcttgtaaatgagctgctagagaacggtatcgagccaatgttgaccatttatcattgggatatgccacaagctcttcaagagaaaggtggctgggaaaatcgtgatatcgttcaatacttccaagaatacgctgctttcctttacgagaatcttggggatgtcgtgaaaaaatggattacgcataatgagccgtgggttgtcacctatttaggatatgggaatggcgaacatgccccagggattcaaaactttacatcatttttaaaagcagcacatcatgttcttctctcacacggggaagcggtaaaagcgtttcgagcaatcggtccgaaagatggggaaattggtattacgttgaatttgacacctggatatgcggttgatccgaaagatgaaaaagcagttgatgccgctcgaaaatgggacggctttaagaatcgttggtttttagatcctgtatttaagggacaatatccagcagatatgttagaagtgtataaagattatttaccagacgtttacaaagagggagatttacaaacgattcagcaaccgatcgactttttcggagttaactattatactacagcaacattaaaagattggaaaaaaggtgaccgtgaaccgatcgtatttgaacatgtgagcacaggaagacctgtgacggatatgaattgggaagtgaatccaaacggtttgtttgatttaatggtgcgattgaaaaaagattatggcgatattccattatacattaccgaaaacggtgctgcatacaaagatcgcgtcaacgaacaaggtgaagtagaagatgatgagcgagttgcttatatacgagagcatttaatcgcttgccaccgcgcgattgaacaaggcgtcaatttaaaaggatattatgtattttcgctgttcgataattttgagtgggcatttggatatgataagcgctttgggattgtatacgtggattatgaaacgctagagcgcatcccgaaaaagagtgcattatggtataaggaaacgattataaacaacggattgaaagcagaaaaagataaaagatctcatcaccatcaccatcactaa

SEQ ID NO: 172 - DNA, 1386 bp, Artificial Sequence
  Derived by Lab Evolution
atgcttcagtttccgaaagattttatttggggagctgcaacttcatcgtatcaaattgaaggaacagcgactggagaagataaaatttactcgatctgggatcacttttcccgcattcctggcaaaatagcgaatggggataatggcgatattgcaattgatcattacaatcgttatgttgaagacatcgcattaatgaaagcgcttcatttgaaagcgtatcgattttcgactagttgggcgagactttattgtgaaacgccagggaagtttaacgaaaaaggtttagatttttataagcgtcttgtaaatgagctgctagagaacggtatcgagccaatgttgaccatttatcattgggatatgccacaagctcttcaagagaaaggtggctgggaaaatcgtgatatcgttcaatacttccaagaatacgctgctttcctttacgagaatcttggggatgtcgtgaaaaaatggattacgcataatgagccgtgggttgtcacctatttaggatatgggaatggcgaacatgccccagggattcaaaactttacatcatttttaaaagcagcacatcatgttcttctctcacacggggaagcggtaaaagcgtttcgagcaatcggtccgaaagatggggaaattggtattacgttgaatttgacacctggatatgcggttgatccgaaagatgaaaaagcagttgatgccgctcgaaaatgggacggctttatgaatcgttggtttttagatcctgtatttaagggacaatatccagcagatatgttagaagtgtataaagattatttaccagacgtttacaaagagggagatttacaaacgattcagcaaccgatcgactttttcggaattaactattatactacagcaacattaaaagattggaaaaaaggtgaccgtgaaccgatcgtatttgaacatgtgagcacaggaagacctgtgacggatatgaattgggaagtgaatccaaacggtttgtttgatttaatggtgcgattgaaaaaagattatggcgatattccattatacattaccgaaaacggtgctgcatacaaagatcgcgtcaacgaacaaggtgaagtagaagatgatgagcgagttgcttatatacgagagcatttaatcgcttgccaccgcgcgattgaacaaggcgtcaatttaaaaggatattttgtattttcgctgttcgataattttgagtgggcatttggatatgataagcgctttgggattgtatacgtggattatgaaacgctagagcgcatcccgaaaaagagtgcattatggtataaggaaacgattataaacaacggattgaaagcagaaaaagataaaagatctcatcaccatcaccatcactaa

SEQ ID NO: 173 - DNA, 1344 bp, Artificial Sequence
  Derived by Lab Evolution
atgagcattcaacgcgacgactttcccgccgacttcgtgtggggcaccgccaccgccgcctaccagatcgagggggcggtagacgaggatggccgcgcccccagcatctgggacaccttcagccacacccctggcaagacccgcgacggtgataccggcgacaccgcttgcgaccactaccaccgctaccgcgaggacgtggccctgatgcgggagctgggcgtcaacgcctaccgcttctccatcgcctggccgcgcgtgctgccccaggggcgcggtgtggtcaacggggccgggctcgacttctacgaccgcctggtggatgcgctgctgggagccgggatcaccccctgggctacgctctaccactgggatttgccccaagccctcgaggacgcgggcggctggccccggcgcgacaccgcctacgccctggccgagtacgccgccgtggtggggcggcgcctgggcgaccggctcaagcgctggatcaccctcaacgagccgtggtgctcggcctacttgggctacggcaacggggtgcacgcgcctggtcgccaggacttcgccctctccttgcaggctgcccaccacctgctgctggggcacggcctggcgacagaggcgctgcgggcggcggtgcccggggctcaggtgggggtcgcgctcaacctcacccccacccacccggccacgcccgatccccgcgacctcgaggccgcccgccgctacgacggcttccataaccgctggtacctcgacccgctgttcggtttcggctacccgctggacatgtgggagctctacgggccgatggtgccccacgtagagccggaggacctgaggcgcatcgccgttcctctcgacttcctgggcatcaactactacactcgctcggtggtgcggcacgcggagcagggtcccctgctcgtcgagcacgtgcgcccggagggcgagtacacctacatgaactgggaggtctatcccgatggcatccgcgagatcgtggcgcgggtggcccgcgagtaccggccacgttccatctacatcaccgagaacggggcctgctatcccgacggggtggagggcgacggggaaatccacgactccaagcgcctggagtactaccgttcccacctcagcaagtgcgcccaggccatccgcgagggggcgccgctgaagggctacttcgcctggagcctgctggacaacttcgagtgggccgagggctacgacaagcgctttgggctgttctatgtcaacttcgccacccaggagcgccgcctcaagcagagcgggcgctggctgaagggcttcctcgagggcgctgcggaggccggttag

SEQ ID NO: 174 - DNA, 1344 bp, Artificial Sequence
  Derived by Lab Evolution
atgagcattcaacgcgacgactttcccgcccatttcgtgtggggcaccgccaccgccgcctaccagatcgagggggcggtagacgaggatggccgcgcccccagcatctgggacaccttcagccacacccctggcaagacccgcgacggtgataccggcgacaccgcttgcgaccactaccaccgctaccgcgaggacgtggccctgatgcgggagctgggcgtcaacgcctaccgcttctccatcgcctggccgcgcgtgctgccccaggggcgcggtgtggtcaacggggccgggctcgacttctacgaccgcctggtggatgcgctgctgggagccgggatcaccccctgggctacgctctaccactgggatttgccccaagccctcgaggacgcgggcggctggccccggcgcgacaccgcctacgccctggccgagtacgccgccgtggtggggcggcgcctgggcgaccggctcaagcgctggatcaccctcaacgagccgtggtgctcggcctacttgggctacggcaacggggtgcacgcgcctggtcgccaggacttcgccctctccttgcaggctgcccaccacctgctgctggggcacggcctggcgacagaggcgctgcgggcggcggtgcccggggctcaggtgggggtcaccctcaacctcacccccacccacccggccacgcccgatccccgcgacctcgaggccgcccgccgctacgacggcttccataaccgctggtacctcgacccgctgttcggtttcggctacccgctggacatgtgggagctctacgggccgatggtgccccacgtagagccggaggacctgaggcgcatcgccgttcctctcgacttcctgggcgttaactactacactcgctcggtggtgcggcacgcggagcagggtcccctgctcgtcgagcacgtgcacccggagggcgagtacacctacatgaactgggaggtctatcccgatggcatccgcgagatcgtggcgcgggtggcccgcgagtaccggccacgttccatctacatcaccgagaacggggcctgctatcccgacggggtggaggacgacggggaaatccacgactccaagcgcctggagtactaccgttcccacctcagcaagtgcgcccaggccatccgcgagggggcgccgctgaagggctacttcgcctggagcctgctggacaacttcgagtgggccgagggctacgacaagcgctttgggctgttctatgtcaacttcgccacccaggagcgccgcctcaagcagagcgggcgctggctgaagggcttcctcgagggcgctgcggaggccggttag

SEQ ID NO: 175 - DNA, 1344 bp, Artificial Sequence
  Derived by Lab Evolution
atgagcattcaacgcgacgactttcccgccgacttcgtgtggggcaccgccaccgccgcctaccagatcgagggggcggtagacgaggatggccgcgcccccagcatctgggacaccttcagccacacccctggcaagacccgcgacggtgataccggcgacaccgcttgcgaccactaccaccgctaccgcgaggacgtggccctgatgcgggagctgggcgtcaacgcctaccgcttctccatcgcctggccgcgcgtgctgccccaggggcgcggtgtggtcaacggggccgggctcgacttctacgaccgcctggtggatgcgctgctgggagccgggatcaccccctgggctacgctctaccactgggatttgccccaagccctcgaggacgcgggcggctggccccggcgcgacaccgcctacgccctggccgagtacgccgccgtggtggggcggcgcctgggcgaccggctcaagcgctggatcaccctcaacgagccgtggtgctcggcctacttgggctacggcaacggggtgcacgcgcctggtcgccaggacttcgccctctccttgcaggctgcccaccacctgctgctggggcacggcctggcgacagaggcgctgcgggcggcggtgcccggggctcaggtgggggtcgcgctcaacctcacccccacccacccggccacgcccgatccccgcgacctcgaggccgcccgccgctacgacggcttccataaccgctggtacctcgacccgctgttcggtttcggctacccgctggacatgtgggagctctacgggccgatggtgccccacgtagagccggaggacctgaggcgcatcgccgttcctctcgacttcctgggcatcaactactacactcgctcggtggtgcggcacgcggagcagggtcccctactcgtcgagcacgtgcgcccggagggcgagtacacctacatgaactgggaggtctatcccgatggcatccgcgagatcgtggcgcgggtggcccgcgagtaccggccacgttccatctacatcaccgagaacggggcctgctatcccgacggggtggaggacgacggggaaatccacgactccaagcgcctggagtactaccgttcccacctcagcaagtgcgcccaggccatccgcgagggggcgccgctgaagggctacttcgcctggagcctgctggacaacttcgagtgggccgagggctacgacaagcgctttgggctgttctatgtcaacttcgccacccaggagcgccgcctcaagcagagcgggcgctggctgaagggcttcctcgagggcgctgcggaggccggttag

SEQ ID NO: 176 - DNA, 1344 bp, Artificial Sequence
  Derived by Lab Evolution
atgagcattcaacgcgacgactttcccgccgacttcgtgtggggcaccgccaccgccgcctaccagatcgagggggcggtagacgaggatggccgcgcccccagcatctgggacaccttcagccacacccctggcaagacccgcgacggtgataccggcgacaccgcttgcgaccactaccaccgctaccgcgaggacgtggccctgatgcgggagctgggcgtcaacgcctaccgcttctccatcgcctggccgcgcgtgctgccccaggggcgcggtgtggtcaacggggccgggctcgacttctacgaccgcctggtggatgcgctgctgggagccgggatcaccccctgggctacgctctaccactgggatttgccccaagccctcgaggacgcgggcggctggccccggcgcgacaccgcctacgccctggccgagtacgccgccgtggtggggcggcgcctgggcgaccggctcaagcgctggatcaccctcaacgagccgtggtgctcggcctacttgggctacggcaacggggtgcacgcgcctggtcgccaggacttcgccctctccttgcaggctgcccaccacctgctgctggggcacggcctggcgacagaggcgctgcgggcggcggtgcccggggctcaggtgggggtcaccctcaacctcacccccacccacccggccacgcccgatccccgcgacctcgaggccgcccgccgctacgacggcttccataaccgctggtacctcgacccgctgttcggtttcggctacccgctggacatgtgggagctctacgggccgatggtgccccacgtagagccggaggacctgaggcgcatcgccgttcctctcgacttcctgggcatcaactactacactcgctcggtggtgcggcgcgcggagcagggtcccctgctcgtcgagcacgtgcgcccggagggcgagtacacctacatgaactgggaggtctatcccgatggcatccgcgagatcgtggcgcgggtggcccgcgagtaccggccacgttccatctacatcaccgagaacggggcctgctatcccgacggggtggaggacgacggggaaatccacgactccaagcgcctggagtactaccgttcccacctcagcaagtgcgcccaggccatccgcgagggggcgccgctgaagggctacttcgcctggagcctgctggacaacttcgagtgggccgagggctacgacaagcgctttgggctgttctatgtcaacttcgccacccaggagcgccgcctcaagcagagcgggcgctggctgaagggcttcctcgagggcgctgcggaggccggttag

SEQ ID NO: 177 - DNA, 1344 bp, Artificial Sequence
  Derived by Lab Evolution
atgagcattcaacgcgacgactttcccgcccatttcgtgtggggcaccgccaccgccgcctaccagatcgagggggcggtagacgaggatggccgcgcccccagcatctgggacaccttcagccacacccctggcaagacccgcgacggtgataccggcgacaccgcttgcgaccactaccaccgctaccgcgaggacgtggccctgatgcgggagctgggcgtcaacgcctaccgcttctccatcgcctggccgcgcgtgctgccccaggggcgcggtgtggtcaacggggccgggctcgacttctacgaccgcctggtggatgcgctgctgggagccgggatcaccccctgggctacgctctaccactgggatttgccccaagccctcgaggacgcgggcggctggccccggcgcgacaccgcctacgccctggccgagtacgccgccgtggtggggcggcgcctgggcgaccggctcaagcgctggatcaccctcaacgagccgtggtgctcggcctacttgggctacggcaacggggtgcacgcgcctggtcgccaggacttcgccctctccttgcaggctgcccaccacctgctgctggggcacggcctggcgacagaggcgctgcgggcggcggtgcccggggctcaggtgggggtcaccctcaacctcacccccacccacccggccacgcccgatccccgcgacctcgaggccgcccgccgctaccacggcttccataaccgctggtacctcgacccgctgttcggtttcggctacccgctggacatgtgggagctctacgggccgatggtgccccacgtagagccggaggacctgaggcgcatcgccgttcctctcgacttcctgggcgttaactactacactcgctcggtggtgcggcacgcggagcagggtcccctgctcgtcgagcacgtgcgcccggagggcgagtacacctacatgaactgggaggtctatcccgatggcatccgcgagatcgtggcgcgggtggcccgcgagtaccggccacgttccatctacatcaccgagaacggggcctgctatcccgacggggtggaggacgacggggaaatccacgactccaagcgcctggagtactaccgttcccacctcagcaagtgcgcccaggccatccgcgagggggcgccgctgaagggctacttcgcctggagcctgctggacaacttcgagtgggccgagggctacgacaagcgctttgggctgttctatgtcaacttcgccacccaggagcgccgcctcaagcagagcgggcgctggctgaagggcttcctcgagggcgctgcggaggccggttag

SEQ ID NO: 178 - DNA, 1344 bp, Artificial Sequence
  Derived by Lab Evolution
atgagcattcaacgcgacgactttcccgcccatttcgtgtggggcaccgccaccgccgcctaccagatcgagggggcggtagacgaggatggccgcgcccccagcatctgggacaccttcagccacacccctggcaagacccgcgacggtgataccggcgacaccgcttgcgaccactaccaccgctaccgcgaggacgtggccctgatgcgggagctgggcgtcaacgcctaccgcttctccatcgcctggccgcgcgtgctgccccaggggcgcggtgtggtcaacggggccgggctcgacttctacgaccgcctggtggatgcgctgctgggagccgggatcaccccctgggctacgctctaccactgggatttgccccaagccctcgaggacgcgggcggctggccccggcgcgacaccgcctacgccctggccgagtacgccgccgtggtggggcggcgcctgggcgaccggctcaagcgctggatcaccctcaacgagccgtggtgctcggcctacttgggctacggcaacggggtgcacgcgcctggtcgccaggacttcgccctctccttgcaggctgcccaccacctgctgctggggcacggcctggcgacagaggcgctgcgggcggcggtgcccggggctcaggtgggggtcgcgctcaacctcacccccacccacccggccacgcccgatccccgcgacctcgaggccgcccgccgctacgacggcttccataaccgctggtacctcgacccgctgttcggtttcggctacccgctggacatgtgggagctctacgggccgatggtgccccacgtagagccggaggacctgaggcgcatcgccgttcctctcgacttcctgggcgttaactactacactcgctcggtggtgcggcacgcggagcagggtcccctgctcgtcgagcacgtgcgcccggagggcgagtacacctacatgaactgggaggtctatcccgatggcatccgcgagatcgtggcgcgggtggcccgcgagtaccggccacgttccatctacatcaccgagaacggggcctgctatcccgacggggtggaggacgacggggaaatccacgactccaagcgcctggagtactaccgttcccacctcagcaagtgcgcccaggccatccgcgagggggcgccgctgaagggctacttcgcctggagcctgctggacaacttcgagtgggccgagggctacgacaagcgctttgggctgttctatgtcaacttcgccacccaggagcgccgcctcaagcagagcgggcgctggctgaagggcttcctcgagggcgctgcggaggccggttag

SEQ ID NO: 179 - DNA, 1344 bp, Artificial Sequence
  Derived by Lab Evolution
atgagcattcaacgcgacgactttcccgccgacttcgtgtggggcaccgccaccgccgcctaccagatcgagggggcggtagacgaggatggccgcgcccccagcatctgggacaccttcagccacacccctggcaagacccgcgacggtgataccggcgacaccgcttgcgaccactaccaccgctaccgcgaggacgtggccctgatgcgggagctgggcgtcaacgcctaccgcttctccatcgcctggccgcgcgtgctgccccaggggcgcggtgtggtcaacggggccgggctcgacttctacgaccgcctggtggatgcgctgctgggagccgggatcaccccctgggctacgctctaccactgggatttgccccaagccctcgaggacgcgggcggctggccccggcgcgacaccgcctacgccctggccgagtacgccgccgtggtggggcggcgcctgggcgaccggctcaagcgctggatcaccctcaacgagccgtggtgctcggcctacttgggctacggcaacggggtgcacgcgcctggtcgccaggacttcgccctctccttgcaggctgcccaccacctgctgctggggcacggcctggcgacagaggcgctgcgggcggcggtgcccggggctcaggtgggggtcgcgctcaacctcacccccacccacccggccacgcccgatccccgcgacctcgaggccgcccgccgctacgacggcttccataaccgctggtacctcgacccgctgttcggtttcggctacccgctggacatgtgggagctctacgggccgatggtgccccacgtagagccggaggacctgaggcgcatcgccgttcctctcgacttcctgggcgttaactactacactcgctcggtggtgcggcacgcggagcagggtcccctgctcgtcgagcacgtgcgcccggagggcgagtacacctacatgaactgggaggtctatcccgatggcatccgcgagatcgtggcgcgggtggcccgcgagtaccggccacgttccatctacatcaccgagaacggggcctgctatcccgacggggtggaggacgacggggaaatccacgactccaagcgcctggagtactaccgttcccacctcagcaagtgcgcccaggccatccgcgagggggcgccgctgaagggctacttcgcctggagcctgctggacaacttcgagtgggccgagggctacgacaagcgctttgggctgttctatgtcaacttcgccacccaggagcgccgcctcaagcagagcgggcgctggctgaagggcttcctcgagggcgctgcggaggccggttag

SEQ ID NO: 180 - DNA, 1344 bp, Artificial Sequence
  Derived by Lab Evolution
atgagcattcaacgcgacgactttcccgcccatttcgtgtggggcaccgccaccgccgcctaccagatcgagggggcggtagacgaggatggccgcgcccccagcatctgggacaccttcagccacacccctggcaagacccgcgacggtgataccggcgacaccgcttgcgaccactaccaccgctaccgcgaggacgtggccctgatgcgggagctgggcgtcaacgcctaccgcttctccatcgcctggccgcgcgtgctgccccaggggcgcggtgtggtcaacggggccgggctcgacttctacgaccgcctggtggatgcgctgctgggagccgggatcaccccctgggctacgctctaccactgggatttgccccaagccctcgaggacgcgggcggctggccccggcgcgacaccgcctacgccctggccgagtacgccgccgtggtggggcggcgcctgggcgaccggctcaagcgctggatcaccctcaacgagccgtggtgctcggcctacttgggctacggcaacggggtgcacgcgcctggtcgccaggacttcgccctctccttgcaggctgcccaccacctgctgctggggcacggcctggcgacagaggcgctgcgggcggcggtgcccggggctcaggtgggggtcagtctcaacctcacccccacccacccggccacgcccgatccccgcgacctcgaggccgcccgccgctacgacggcttccataaccgctggtacctcgacccgctgttcggtttcggctacccgctggacatgtgggagctctacgggccgatggtgccccacgtagagccggaggacctgaggcgcatcgccgttcctctcgacttcctgggcgttaactactacactcgctcggtggtgcggcacgcggagcagggtcccctgctcgtcgagcacgtgcgcccggagggcgagtacacctacatgaactgggaggtctatcccgatggcatccgcgagatcgtggcgcgggtggcccgcgagtaccggccacgttccatctacatcaccgagaacggggcctgctatcccgacggggtggaggacgacggggaaatccacgactccaagcgcctggagtactaccgttcccacctcagcaagtgcgcccaggccatccgcgagggggcgccgctgaagggctacttcgcctggagcctgctggacaacttcgagtgggccgagggctacgacaagcgctttgggctgttctatgtcaacttcgccacccaggagcgccgcctcaagcagagcgggcgctggctgaagggcttcctcgagggcgctgcggaggccggttag

SEQ ID NO: 181 - DNA, 1344 bp, Artificial Sequence
  Derived by Lab Evolution
atgagcattcaacgcgacgactttcccgccgacttcgtgtggggcaccgccaccgccgcctaccagatcgagggggcggtagacgaggatggccgcgcccccagcatctgggacaccttcagccacacccctggcaagacccgcgacggtgataccggcgacaccgcttgcgaccactaccaccgctaccgcgaggacgtggccctgatgcgggagctgggcgtcaacgcctaccgcttctccatcgcctggccgcgcgtgctgccccaggggcgcggtgtggtcaacggggccgggctcgacttctacgaccgcctggtggatgcgctgctgggagccgggatcaccccctgggctacgctctaccactgggatttgccccaagccctcgaggacgcgggcggctggccccggcgcgacaccgcctacgccctggccgagtacgccgccgtggtggggcggcgcctgggcgaccggctcaagcgctggatcaccctcaacgagccgtggtgctcggcctacttgggctacggcaacggggtgcacgcgcctggtcgccaggacttcgccctctccttgcaggctgcccaccacctgctgctggggcacggcctggcgacagaggcgctgcgggcggcggtgcccggggctcaggtgggggtcagtctcaacctcacccccacccacccggccacgcccgatccccgcgacctcgaggccgcccgccgctacgacggcttccataaccgctggtacctcgacccgctgttcggtttcggctacccgctggacatgtgggagctctacgggccgatggtgccccacgtagagccggaggacctgaggcgcatcgccgttcctctcgacttcctgggcgttaactactacactcgctcggtggtgcggcacgcggagcagggtcccctgctcgtcgagcacgtgcgcccggagggcgagtacacctacatgaactgggaggtctatcccgatggcatccgcgagatcgtggcgcgggtggcccgcgagtaccggccacgttccatctacatcaccgagaacggggcctgctatcccgacggggtggaggacgacggggaaatccacgactccaagcgcctggagtactaccgttcccacctcagcaagtgcgcccaggccatccgcgagggggcgccgctgaagggctacttcgcctggagcctgctggacaacttcgagtgggccgagggctacgacaagcgctttgggctgttctatgtcaacttcgccacccaggagcgccgcctcaagcagagcgggcgctggctgaagggcttcctcgagggcgctgcggaggccggttag

SEQ ID NO: 182 - DNA, 1344 bp, Artificial Sequence
  Derived by Lab Evolution
atgagcattcaacgcgacgactttcccgcccatttcgtgtggggcaccgccaccgccgcctaccagatcgagggggcggtagacgaggatggccgcgcccccagcatctgggacaccttcagccacacccctggcaagacccgcgacggtgataccggcgacaccgcttgcgaccactaccaccgctaccgcgaggacgtggccctgatgcgggagctgggcgtcaacgcctaccgcttctccatcgcctggccgcgcgtgctgccccaggggcgcggtgtggtcaacggggccgggctcgacttctacgaccgcctggtggatgcgctgctgggagccgggatcaccccctgggctacgctctaccactgggatttgccccaagccctcgaggacgcgggcggctggccccggcgcgacaccgcctacgccctggccgagtacgccgccgtggtggggcggcgcctgggcgaccggctcaagcgctggatcaccctcaacgagccgtggtgctcggcctacttgggctacggcaacggggtgcacgcgcctggtcgccaggacttcgccctctccttgcaggctgcccaccacctgctgctggggcacggcctggcgacagaggcgctgcgggcggcggtgcccggggctcaggtgggggtcaccctcaacctcacccccacccacccggccacgcccgatccccgcgacctcgaggccgcccgccgctacgacggcttccataaccgctggtacctcgacccgctgttcggtttcggctacccgctggacatgtgggagctctacgggccgatggtgccccacgtagagccggaggacctgaggcgcatcgccgttcctctcgacttcctgggcgttaactactacactcgctcggtggtgcggcacgcggagcagggtcccctgctcgtcgagcacgtgcgcccggagggcgagtacacctacatgaactgggaggtctatcccgatggcatccgcgagatcgtggcgcgggtggcccgcgagtaccggccacgttccatctacatcaccgagaacggggcctgctatcccgacggggtggaggacgacggggaaatccacgactccaagcgcctggagtactaccgttcccacctcagcaagtgcgcccaggccatccgcgagggggcgccgctgaagggctacttcgcctggagcctgctggacaacttcgagtgggccgagggctacgacaagcgctttgggctgttctatgtcaacttcgccacccaggagcgccgcctcaagcagagcgggcgctggctgaagggcttcctcgagggcgctgcggaggccggttag

SEQ ID NO: 183 - DNA, 1344 bp, Artificial Sequence
  Derived by Lab Evolution
atgagcattcaacgcgacgactttcccgccgacttcgtgtggggcaccgccaccgccgcctaccagatcgagggggcggtagacgaggatggccgcgcccccagcatctgggacaccttcagccacacccctggcaagacccgcgacggtgataccggcgacaccgcttgcgaccactaccaccgctaccgcgaggacgtggccctgatgcgggagctgggcgtcaacgcctaccgcttctccatcgcctggccgcgcgtgctgccccaggggcgcggtgtggtcaacggggccgggctcgacttctacgaccgcctggtggatgcgctgctgggagccgggatcaccccctgggctacgctctaccactgggatttgccccaagccctcgaggacgcgggcggctggccccggcgcgacaccgcctacgccctggccgagtacgccgccgtggtggggcggcgcctgggcgaccggctcaagcgctggatcaccctcaacgagccgtggtgctcggcctacttgggctacggcaacggggtgcacgcgcctggtcgccaggacttcgccctctccttgcaggctgcccaccacctgctgctggggcacggcctggcgacagaggcgctgcgggcggcggtgcccggggctcaggtgggggtcaccctcaacctcacccccacccacccggccacgcccgatccccgcgacctcgaggccgcccgccgctacgacggcttccataaccgctggtacctcgacccgctgttcggtttcggctacccgctggacatgtgggagctctacgggccgatggtgccccacgtagagccggaggacctgaggcgcatcgccgttcctctcgacttcctgggcgttaactactacactcgctcggtggtgcggcacgcggagcagggtcccctgctcgtcgagcacgtgcgcccggagggcgagtacacctacatgaactgggaggtctatcccgatggcatccgcgagatcgtggcgcgggtggcccgcgagtaccggccacgttccatctacatcaccgagaacggggcctgctatcccgacggggtggaggacgacggggaaatccacgactccaagcgcctggagtactaccgttcccacctcagcaagtgcgcccaggccatccgcgagggggcgccgctgaagggctacttcgcctggagcctgctggacaacttcgagtgggccgagggctacgacaagcgctttgggctgttctatgtcaacttcgccacccaggagcgccgcctcaagcagagcgggcgctggctgaagggcttcctcgagggcgctgcggaggccggttag

SEQ ID NO: 184 - DNA, 1344 bp, Artificial Sequence
  Derived by Lab Evolution
atgagcattcaacgcgacgactttcccgccgacttcgtgtggggcaccgccaccgccgcctaccagatcgagggggcggtagacgaggatggccgcgcccccagcatctgggacaccttcagccacacccctggcaagacccgcgacggtgataccggcgacaccgcttgcgaccactaccaccgctaccgcgaggacgtggccctgatgcgggagctgggcgtcaacgcctaccgcttctccatcgcctggccgcgcgtgctgccccaggggcgcggtgtggtcaacggggccgggctcgacttctacgaccgcctggtggatgcgctgctgggagccgggatcaccccctgggctacgctctaccactgggatttgccccaagccctcgaggacgcgggcggctggccccggcgcgacaccgcctacgccctggccgagtacgccgccgtggtggggcggcgcctgggcgaccggctcaagcgctggatcaccctcaacgagccgtggtgctcggcctacttgggctacggcaacggggtgcacgcgcctggtcgccaggacttcgccctctccttgcaggctgcccaccacctgctgctggggcacggcctggcgacagaggcgctgcgggcggcggtgcccggggctcaggtgggggtcgcgctcaacctcacccccacccacccggccacgcccgatccccgcgacctcgaggccgcccgccgctacgacggcttcaagaaccgctggtacctcgacccgctgttcggtttcggctacccgctggacatgtgggagctctacgggccgatggtgccccacgtagagccggaggacctgaggcgcatcgccgttcctctcgacttcctgggcgttaactactacactcgctcggtggtgcggcacgcggagcagggtcccctgctcgtcgagcacgtgcgcccggagggcgagtacacctacatgaactgggaggtctatcccgatggcatccgcgagatcgtggcgcgggtggcccgcgagtaccggccacgttccatctacatcaccgagaacggggcctgctatcccgacggggtggaggacgacggggaaatccacgactccaagcgcctggagtactaccgttcccacctcagcaagtgcgcccaggccatccgcgagggggcgccgctgaagggctacttcgcctggagcctgctggacaacttcgagtgggccgagggctacgacaagcgctttgggctgttctatgtcaacttcgccacccaggagcgccgcctcaagcagagcgggcgctggctgaagggcttcctcgagggcgctgcggaggccggttag

SEQ ID NO: 185 - DNA, 1344 bp, Artificial Sequence
  Derived by Lab Evolution
atgagcattcaacgcgacgactttcccgccgacttcgtgtggggcaccgccaccgccgcctaccagatcgagggggcggtagacgaggatggccgcgcccccagcatctgggacaccttcagccacacccctggcaagacccgcgacggtgataccggcgacaccgcttgcgaccactaccaccgctaccgcgaggacgtggccctgatgcgggagctgggcgtcaacgcctaccgcttctccatcgcctggccgcgcgtgctgccccaggggcgcggtgtggtcaacggggccgggctcgacttctacgaccgcctggtggatgcgctgctgggagccgggatcaccccctgggctacgctctaccactgggatttgccccaagccctcgaggacgcgggcggctggccccggcgcgacaccgcctacgccctggccgagtacgccgccgtggtggggcggcgcctgggcgaccggctcaagcgctggatcaccctcaacgagccgtggtgctcggcctacttgggctacggcaacggggtgcacgcgcctggtcgccaggacttcgccctctccttgcaggctgcccaccacctgctgctggggcacggcctggcgacagaggcgctgcgggcggcggtgcccggggctcaggtgggggtcagtctcaacctcacccccacccacccggccacgcccgatccccgcgacctcgaggccgcccgccgctacgacggcttcaagaaccgctggtacctcgacccgctgttcggtttcggctacccgctggacatgtgggagctctacgggccgatggtgccccacgtagagccggaggacctgaggcgcatcgccgttcctctcgacttcctgggcgttaactactacactcgctcggtggtgcggcacgcggagcagggtcccctgctcgtcgagcacgtgcgcccggagggcgagtacacctacatgaactgggaggtctatcccgatggcatccgcgagatcgtggcgcgggtggcccgcgagtaccggccacgttccatctacatcaccgagaacggggcctgctatcccgacggggtggaggacgacggggaaatccacgactccaagcgcctggagtactaccgttcccacctcagcaagtgcgcccaggccatccgcgagggggcgccgctgaagggctacttcgcctggagcctgctggacaacttcgagtgggccgagggctacgacaagcgctttgggctgttctatgtcaacttcgccacccaggagcgccgcctcaagcagagcgggcgctggctgaagggcttcctcgagggcgctgcggaggccggttag

SEQ ID NO: 186 - DNA, 1344 bp, Artificial Sequence
  Derived by Lab Evolution
atgagcattcaacgcgacgactttcccgccgacttcgtgtggggcaccgccaccgccgcctaccagatcgagggggcggtagacgaggatggccgcgcccccagcatctgggacaccttcagccacacccctggcaagacccgcgacggtgataccggcgacaccgcttgcgaccactaccaccgctaccgcgaggacgtggccctgatgcgggagctgggcgtcaacgcctaccgcttctccatcgcctggccgcgcgtgctgccccaggggcgcggtgtggtcaacggggccgggctcgacttctacgaccgcctggtggatgcgctgctgggagccgggatcaccccctgggctacgctctaccactgggatttgccccaagccctcgaggacgcgggcggctggccccggcgcgacaccgcctacgccctggccgagtacgccgccgtggtggggcggcgcctgggcgaccggctcaagcgctggatcaccctcaacgagccgtggtgctcggcctacttgggctacggcaacggggtgcacgcgcctggtcgccaggacttcgccctctccttgcaggctgcccaccacctgctgctggggcacggcctggcgacagaggcgctgcgggcggcggtgcccggggctcaggtgggggtcaccctcaacctcacccccacccacccggccacgcccgatccccgcgacctcgaggccgcccgccgctacgacggcttcaagaaccgctggtacctcgacccgctgttcggtttcggctacccgctggacatgtgggagctctacgggccgatggtgccccacgtagagccggaggacctgaggcgcatcgccgttcctctcgacttcctgggcgttaactactacactcgctcggtggtgcggcacgcggagcagggtcccctgctcgtcgagcacgtgcgcccggagggcgagtacacctacatgaactgggaggtctatcccgatggcatccgcgagatcgtggcgcgggtggcccgcgagtaccggccacgttccatctacatcaccgagaacggggcctgctatcccgacggggtggaggacgacggggaaatccacgactccaagcgcctggagtactaccgttcccacctcagcaagtgcgcccaggccatccgcgagggggcgccgctgaagggctacttcgcctggagcctgctggacaacttcgagtgggccgagggctacgacaagcgctttgggctgttctatgtcaacttcgccacccaggagcgccgcctcaagcagagcgggcgctggctgaagggcttcctcgagggcgctgcggaggccggttag

SEQ ID NO: 187 - DNA, 1344 bp, Artificial Sequence
  Derived by Lab Evolution
atgagcattcaacgcgacgactttcccgccgacttcgtgtggggcaccgccaccgccgcctaccagatcgagggggcggtagacgaggatggccgcgcccccagcatctgggacaccttcagccacacccctggcaagacccgcgacggtgataccggcgacaccgcttgcgaccactaccaccgctaccgcgaggacgtggccctgatgcgggagctgggcgtcaacgcctaccgcttctccatcgcctggccgcgcgtgctgccccaggggcgcggtgtggtcaacggggccgggctcgacttctacgaccgcctggtggatgcgctgctgggagccgggatcaccccctgggctacgctctaccactgggatttgccccaagccctcgaggacgcgggcggctggccccggcgcgacaccgcctacgccctggccgagtacgccgccgtggtggggcggcgcctgggcgaccggctcaagcgctggatcaccctcaacgagccgtggtgctcggcctacttgggctacggcaacggggtgcacgcgcctggtcgccaggacttcgccctctccttgcaggctgcccaccacctgctgctggggcacggcctggcgacagaggcgctgcgggcggcggtgcccggggctcaggtgggggtcgcgctcaacctcacccccacccacccggccacgcccgatccccgcgacctcgaggccgcccgccgctacgacggcttcttcaaccgctggtacctcgacccgctgttcggtttcggctacccgctggacatgtgggagctctacgggccgatggtgccccacgtagagccggaggacctgaggcgcatcgccgttcctctcgacttcctgggcgttaactactacactcgctcggtggtgcggcacgcggagcagggtcccctgctcgtcgagcacgtgcgcccggagggcgagtacacctacatgaactgggaggtctatcccgatggcatccgcgagatcgtggcgcgggtggcccgcgagtaccggccacgttccatctacatcaccgagaacggggcctgctatcccgacggggtggaggacgacggggaaatccacgactccaagcgcctggagtactaccgttcccacctcagcaagtgcgcccaggccatccgcgagggggcgccgctgaagggctacttcgcctggagcctgctggacaacttcgagtgggccgagggctacgacaagcgctttgggctgttctatgtcaacttcgccacccaggagcgccgcctcaagcagagcgggcgctggctgaagggcttcctcgagggcgctgcggaggccggttag

SEQ ID NO: 188 - DNA, 1344 bp, Artificial Sequence
  Derived by Lab Evolution
atgagcattcaacgcgacgactttcccgccgacttcgtgtggggcaccgccaccgccgcctaccagatcgagggggcggtagacgaggatggccgcgcccccagcatctgggacaccttcagccacacccctggcaagacccgcgacggtgataccggcgacaccgcttgcgaccactaccaccgctaccgcgaggacgtggccctgatgcgggagctgggcgtcaacgcctaccgcttctccatcgcctggccgcgcgtgctgccccaggggcgcggtgtggtcaacggggccgggctcgacttctacgaccgcctggtggatgcgctgctgggagccgggatcaccccctgggctacgctctaccactgggatttgccccaagccctcgaggacgcgggcggctggccccggcgcgacaccgcctacgccctggccgagtacgccgccgtggtggggcggcgcctgggcgaccggctcaagcgctggatcaccctcaacgagccgtggtgctcggcctacttgggctacggcaacggggtgcacgcgcctggtcgccaggacttcgccctctccttgcaggctgcccaccacctgctgctggggcacggcctggcgacagaggcgctgcgggcggcggtgcccggggctcaggtgggggtcaccctcaacctcacccccacccacccggccacgcccgatccccgcgacctcgaggccgcccgccgctaccacggcttccataaccgctggtacctcgacccgctgttcggtttcggctacccgctggacatgtgggagctctacgggccgatggtgccccacgtagagccggaggacctgaggcgcatcgccgttcctctcgacttcctgggcatcaactactacactcgctcggtggtgcggcacgcggagcagggtcccctgctcgtcgagcacgtgcgcccggagggcgagtacacctacatgaactgggaggtctatcccgatggcatccgcgagatcgtggcgcgggtggcccgcgagtaccggccacgttccatctacatcaccgagaacggggcctgctatcccgacggggtggaggacgacggggaaatccacgactccaagcgcctggagtactaccgttcccacctcagcaagtgcgcccaggccatccgcgagggggcgccgctgaagggctacttcgcctggagcctgctggacaacttcgagtgggccgagggctacgacaagcgctttgggctgttctatgtcaacttcgccacccaggagcgccgcctcaagcagagcgggcgctggctgaagggcttcctcgagggcgctgcggaggccggttag

SEQ ID NO: 189 - DNA, 1344 bp, Artificial Sequence
  Derived by Lab Evolution
atgagcattcaacgcgacgactttcccgcccatttcgtgtggggcaccgccaccgccgcctaccagatcgagggggcggtagacgaggatggccgcgcccccagcatctgggacaccttcagccacacccctggcaagacccgcgacggtgataccggcgacaccgcttgcgaccactaccaccgctaccgcgaggacgtggccctgatgcgggagctgggcgtcaacgcctaccgcttctccatcgcctggccgcgcgtgctgccccaggggcgcggtgtggtcaacggggccgggctcgacttctacgaccgcctggtggatgcgctgctgggagccgggatcaccccctgggctacgctctaccactgggatttgccccaagccctcgaggacgcgggcggctggccccggcgcgacaccgcctacgccctggccgagtacgccgccgtggtggggcggcgcctgggcgaccggctcaagcgctggatcaccctcaacgagccgtggtgctcggcctacttgggctacggcaacggggtgcacgcgcctggtcgccaggacttcgccctctccttgcaggctgcccaccacctgctgctggggcacggcctggcgacagaggcgctgcgggcggcggtgcccggggctcaggtgggggtcgcgctcaacctcacccccacccacccggccacgcccgatccccgcgacctcgaggccgcccgccgctacgacggcttccataaccgctggtacctcgacccgctgttcggtttcggctacccgctggacatgtgggagctctacgggccgatggtgccccacgtagagccggaggacctgaggcgcatcgccgttcctctcgacttcctgggcatcaactactacactcgctcggtggtgcggcacgcggagcagggtcccctgctcgtcgagcacgtgcgcccggagggcgagtacacctacatgaactgggaggtctatcccgatggcatccgcgagatcgtggcgcgggtggcccgcgagtaccggccacgttccatctacatcaccgagaacggggcctgctatcccgacggggtggaggacgacggggaaatccacgactccaagcgcctggagtactaccgttcccacctcagcaagtgcgcccaggccatccgcgagggggcgccgctgaagggctacttcgcctggagcctgctggacaacttcgagtgggccgagggctacgacaagcgctttgggctgttctatgtcaacttcgccacccaggagcgccgcctcaagcagagcgggcgctggctgaagggcttcctcgagggcgctgcggaggccggttag

SEQ ID NO: 190 - DNA, 1344 bp, Artificial Sequence
  Derived by Lab Evolution
atgagcattcaacgcgacgactttcccgccgacttcgtgtggggcaccgccaccgccgcctaccagatcgagggggcggtagacgaggatggccgcgcccccagcatctgggacaccttcagccacacccctggcaagacccgcgacggtgataccggcgacaccgcttgcgaccactaccaccgctaccgcgaggacgtggccctgatgcgggagctgggcgtcaacgcctaccgcttctccatcgcctggccgcgcgtgctgccccaggggcgcggtgtggtcaacggggccgggctcgacttctacgaccgcctggtggatgcgctgctgggagccgggatcaccccctgggctacgctctaccactgggatttgccccaagccctcgaggacgcgggcggctggccccggcgcgacaccgcctacgccctggccgagtacgccgccgtggtggggcggcgcctgggcgaccggctcaagcgctggatcaccctcaacgagccgtggtgctcggcctacttgggctacggcaacggggtgcacgcgcctggtcgccaggacttcgccctctccttgcaggctgcccaccacctgctgctggggcacggcctggcgacagaggcgctgcgggcggcggtgcccggggctcaggtgggggtcgcgctcaacctcacccccacccacccggccacgcccgatccccgcgacctcgaggccgcccgccgctacgacggcttccataaccgctggtacctcgacccgctgttcggtttcggctacccgctggacatgtgggagctctacgggccgatggtgccccacgtagagccggaggacctgaggcgcatcgccgttcctctcgacttcctgggcatcaactactacactcgctcggtggtgcggcacgcggagcagggtcccctgctcgtcgagcacgtgcgcccggagggcgagtacacctacatgaactgggaggtctatcccgatggcatccgcgagatcgtggcgcgggtggcccgcgagtaccggccacgttccatctacatcaccgagaacggggcctgctatcccgacggggtggaggacgacggggaaatccacgactccaagcgcctggagtactaccgttcccacctcagcaagtgcgcccaggccatccgcgagggggcgccgctgaagggctacttcgcctggagcctgctggacaacttcgagtgggccgagggctacgacaagcgctttgggctgttctatgtcaacttcgccacccaggagcgccgcctcaagcagagcgggcgctggctgaagggcttcctcgagggcgctgcggaggccggttag

SEQ ID NO: 191 - DNA, 1344 bp, Artificial Sequence
  Derived by Lab Evolution
atgagcattcaacgcgacgactttcccgccgacttcgtgtggggcaccgccaccgccgcctaccagatcgagggggcggtagacgaggatggccgcgcccccagcatctgggacaccttcagccacacccctggcaagacccgcgacggtgataccggcgacaccgcttgcgaccactaccaccgctaccgcgaggacgtggccctgatgcgggagctgggcgtcaacgcctaccgcttctccatcgcctggccgcgcgtgctgccccaggggcgcggtgtggtcaacggggccgggctcgacttctacgaccgcctggtggatgcgctgctgggagccgggatcaccccctgggctacgctctaccactgggatttgccccaagccctcgaggacgcgggcggctggccccggcgcgacaccgcctacgccctggccgagtacgccgccgtggtggggcggcgcctgggcgaccggctcaagcgctggatcaccctcaacgagccgtggtgctcggcctacttgggctacggcaacggggtgcacgcgcctggtcgccaggacttcgccctctccttgcaggctgcccaccacctgctgctggggcacggcctggcgacagaggcgctgcgggcggcggtgcccggggctcaggtgggggtcagtctcaacctcacccccacccacccggccacgcccgatccccgcgacctcgaggccgcccgccgctacgacggcttccataaccgctggtacctcgacccgctgttcggtttcggctacccgctggacatgtgggagctctacgggccgatggtgccccacgtagagccggaggacctgaggcgcatcgccgttcctctcgacttcctgggcatcaactactacactcgctcggtggtgcggcacgcggagcagggtcccctgctcgtcgagcacgtgcgcccggagggcgagtacacctacatgaactgggaggtctatcccgatggcatccgcgagatcgtggcgcgggtggcccgcgagtaccggccacgttccatctacatcaccgagaacggggcctgctatcccgacggggtggaggacgacggggaaatccacgactccaagcgcctggagtactaccgttcccacctcagcaagtgcgcccaggccatccgcgagggggcgccgctgaagggctacttcgcctggagcctgctggacaacttcgagtgggccgagggctacgacaagcgctttgggctgttctatgtcaacttcgccacccaggagcgccgcctcaagcagagcgggcgctggctgaagggcttcctcgagggcgctgcggaggccggttag

SEQ ID NO: 192 - DNA, 1344 bp, Artificial Sequence
  Derived by Lab Evolution
atgagcattcaacgcgacgactttcccgccgacttcgtgtggggcaccgccaccgccgcctaccagatcgagggggcggtagacgaggatggccgcgcccccagcatctgggacaccttcagccacacccctggcaagacccgcgacggtgataccggcgacaccgcttgcgaccactaccaccgctaccgcgaggacgtggccctgatgcgggagctgggcgtcaacgcctaccgcttctccatcgcctggccgcgcgtgctgccccaggggcgcggtgtggtcaatggggccgggctcgacttctacgaccgcctggtggatgcgctgctgggagccgggatcaccccctgggctacgctctaccactgggatttgccccaagccctcgaggacgcgggcggctggccccggcgcgacaccgcctacgccctggccgagtacgccgccgtggtggggcggcgcctgggcgaccggctcaagcgctggatcaccctcaacgagccgtggtgctcggcctacttgggctacggcaacggggtgcacgcgcctggtcgccaggacttcgccctctccttgcaggctgcccaccacctgctgctggggcacggcctggcgacagaggcgctgcgggcggcggtgcccggggctcaggtgggggtcaccctcaacctcacccccacccacccggccacgcccgatccccgcgacctcgaggccgcccgccgctacgacggcttccataaccgctggtacctcgacccgctgttcggtttcggctacccgctggacatgtgggagctctacgggccgatggtgccccacgtagagccggaggacctgaggcgcatcgccgttcctctcgacttcctgggcatcaactactacactcgctcggtggtgcggcacgcggagcagggtcccctgctcgtcgagcacgtgcgcccggagggcgagtacacctacatgaactgggaggtctatcccgatggcatccgcgagatcgtggcgcgggtggcccgcgagtaccggccacgttccatctacatcaccgagaacggggcctgctatcccgacggggtggaggacgacggggaaatccacgactccaagcgcctggagtactaccgttcccacctcagcaagtgcgcccaggccatccgcgagggggcgccgctgaagggctacttcgcctggagcctgctggacaacttcgagtgggccgagggctacgacaagcgctttgggctgttctatgtcaacttcgccacccaggagcgccgcctcaagcagagcgggcgctggctgaagggcttcctcgagggcgctgcggaggccggttag

SEQ ID NO: 193 - DNA, 1344 bp, Artificial Sequence
  Derived by Lab Evolution
atgagcattcaacgcgacgactttcccgcccatttcgtgtggggcaccgccaccgccgcctaccagatcgagggggcggtagacgaggatggccgcgcccccagcatctgggacaccttcagccacacccctggcaagacccgcgacggtgataccggcgacaccgcttgcgaccactaccaccgctaccgcgaggacgtggccctgatgcgggagctgggcgtcaacgcctaccgcttctccatcgcctggccgcgcgtgctgccccaggggcgcggtgtggtcaacggggccgggctcgacttctacgaccgcctggtggatgcgctgctgggagccgggatcaccccctgggctacgctctaccactgggatttgccccaagccctcgaggacgcgggcggctggccccggcgcgacaccgcctacgccctggccgagtacgccgccgtggtggggcggcgcctgggcgaccggctcaagcgctggatcaccctcaacgagccgtggtgctcggcctacttgggctacggcaacggggtgcacgcgcctggtcgccaggacttcgccctctccttgcaggctgcccaccacctgctgctggggcacggcctggcgacagaggcgctgcgggcggcggtgcccggggctcaggtgggggtcaccctcaacctcacccccacccacccggccacgcccgatccccgcgacctcgaggccgcccgccgctacgacggcttccataaccgctggtacctcgacccgctgttcggtttcggctacccgctggacatgtgggagctctacgggccgatggtgccccacgtagagccggaggacctgaggcgcatcgccgttcctctcgacttcctgggcatcaactactacactcgctcggtggtgcggcacgcggagcagggtcccctgctcgtcgagcacgtgcgcccggagggcgagtacacctacatgaactgggaggtctatcccgatggcatccgcgagatcgtggcgcgggtggcccgcgagtaccggccacgttccatctacatcaccgagaacggggcctgctatcccgacggggtggaggacgacggggaaatccacgactccaagcgcctggagtactaccgttcccacctcagcaagtgcgcccaggccatccgcgagggggcgccgctgaagggctacttcgcctggagcctgctggacaacttcgagtgggccgagggctacgacaagcgctttgggctgttctatgtcaacttcgccacccaggagcgccgcctcaagcagagcgggcgctggctgaagggcttcctcgagggcgctgcggaggccggttag

SEQ ID NO: 194 - DNA, 1344 bp, Artificial Sequence
  Derived by Lab Evolution
atgagcattcaacgcgacgactttcccgccgacttcgtgtggggcaccgccaccgccgcctaccagatcgagggggcggtagacgaggatggccgcgcccccagcatctgggacaccttcagccacacccctggcaagacccgcgacggtgataccggcgacaccgcttgcgaccactaccaccgctaccgcgaggacgtggccctgatgcgggagctgggcgtcaacgcctaccgcttctccatcgcctggccgcgcgtgctgccccaggggcgcggtgtggtcaacggggccgggctcgacttctacgaccgcctggtggatgcgctgctgggagccgggatcaccccctgggctacgctctaccactgggatttgccccaagccctcgaggacgcgggcggctggccccggcgcgacaccgcctacgccctggccgagtacgccgccgtggtggggcggcgcctgggcgaccggctcaagcgctggatcaccctcaacgagccgtggtgctcggcctacttgggctacggcaacggggtgcacgcgcctggtcgccaggacttcgccctctccttgcaggctgcccaccacctgctgctggggcacggcctggcgacagaggcgctgcgggcggcggtgcccggggctcaggtgggggtcaccctcaacctcacccccacccacccggccacgcccgatccccgcgacctcgaggccgcccgccgctacgacggcttccataaccgctggtacctcgacccgctgttcggtttcggctacccgctggacatgtgggagctctacgggccgatggtgccccacgtagagccggaggacctgaggcgcatcgccgttcctctcgacttcctgggcatcaactactacactcgctcggtggtgcggcacgcggagcagggtcccctgctcgtcgagcacgtgcgcccggagggcgagtacacctacatgaactgggaggtctatcccgatggcatccgcgagatcgtggcgcgggtggcccgcgagtaccggccacgttccatctacatcaccgagaacggggcctgctatcccgacggggtggaggacgacggggaaatccacgactccaagcgcctggagtactaccgttcccacctcagcaagtgcgcccaggccatccgcgagggggcgccgctgaagggctacttcgcctggagcctgctggacaacttcgagtgggccgagggctacgacaagcgctttgggctgttctatgtcaacttcgccacccaggagcgccgcctcaagcagagcgggcgctggctgaagggcttcctcgagggcgctgcggaggccggttag

SEQ ID NO: 195 - DNA, 1344 bp, Artificial Sequence
  Derived by Lab Evolution
atgagcattcaacgcgacgactttcccgcccatttcgtgtggggcaccgccaccgccgcctaccagatcgagggggcggtagacgaggatggccgcgcccccagcatctgggacaccttcagccacacccctggcaagacccgcgacggtgataccggcgacaccgcttgcgaccactaccaccgctaccgcgaggacgtggccctgatgcgggagctgggcgtcaacgcctaccgcttctccatcgcctggccgcgcgtgctgccccaggggcgcggtgtggtcaacggggccgggctcgacttctacgaccgcctggtggatgcgctgctgggagccgggatcaccccctgggctacgctctaccactgggatttgccccaagccctcgaggacgcgggcggctggccccggcgcgacaccgcctacgccctggccgagtacgccgccgtggtggggcggcgcctgggcgaccggctcaagcgctggatcaccctcaacgagccgtggtgctcggcctacttgggctacggcaacggggtgcacgcgcctggtcgccaggacttcgccctctccttgcaggctgcccaccacctgctgctggggcacggcctggcgacagaggcgctgcgggcggcggtgcccggggctcaggtgggggtcaccctcaacctcacccccacccacccggccacgcccgatccccgcgacctcgaggccgcccgccgctacgacggcttcaagaaccgctggtacctcgacccgctgttcggtttcggctacccgctggacatgtgggagctctacgggccgatggtgccccacgtagagccggaggacctgaggcgcatcgccgttcctctcgacttcctgggcatcaactactacactcgctcggtggtgcggcacgcggagcagggtcccctgctcgtcgagcacgtgcgcccggagggcgagtacacctacatgaactgggaggtctatcccgatggcatccgcgagatcgtggcgcgggtggcccgcgagtaccggccacgttccatctacatcaccgagaacggggcctgctatcccgacggggtggaggacgacggggaaatccacgactccaagcgcctggagtactaccgttcccacctcagcaagtgcgcccaggccatccgcgagggggcgccgctgaagggctacttcgcctggagcctgctggacaacttcgagtgggccgagggctacgacaagcgctttgggctgttctatgtcaacttcgccacccaggagcgccgcctcaagcagagcgggcgctggctgaagggcttcctcgagggcgctgcggaggccggttag

SEQ ID NO: 196 - DNA, 1344 bp, Artificial Sequence
  Derived by Lab Evolution
atgagcattcaacgcgacgactttcccgccgacttcgtgtggggcaccgccaccgccgcctaccagatcgagggggcggtagacgaggatggccgcgcccccagcatctgggacaccttcagccacacccctggcaagacccgcgacggtgataccggcgacaccgcttgcgaccactaccaccgctaccgcgaggacgtggccctgatgcgggagctgggcgtcaacgcctaccgcttctccatcgcctggccgcgcgtgctgccccaggggcgcggtgtggtcaacggggccgggctcgacttctacgaccgcctggtggatgcgctgctgggagccgggatcaccccctgggctacgctctaccactgggatttgccccaagccctcgaggacgcgggcggctggccccggcgcgacaccgcctacgccctggccgagtacgccgccgtggtggggcggcgcctgggcgaccggctcaagcgctggatcaccctcaacgagccgtggtgctcggcctacttgggctacggcaacggggtgcacgcgcctggtcgccaggacttcgccctctccttgcaggctgcccaccacctgctgctggggcacggcctggcgacagaggcgctgcgggcggcggtgcccggggctcaggtgggggtcaccctcaacctcacccccacccacccggccacgcccgatccccgcgacctcgaggccgcccgccgctacgacggcttcaagaaccgctggtacctcgacccgctgttcggtttcggctacccgctggacatgtgggagctctacgggccgatggtgccccacgtagagccggaggacctgaggcgcatcgccgttcctctcgacttcctgggcatcaactactacactcgctcggtggtgcggcacgcggagcagggtcccctgctcgtcgagcacgtgcgcccggagggcgagtacacctacatgaactgggaggtctatcccgatggcatccgcgagatcgtggcgcgggtggcccgcgagtaccggccacgttccatctacatcaccgagaacggggcctgctatcccgacggggtggaggacgacggggaaatccacgactccaagcgcctggagtactaccgttcccacctcagcaagtgcgcccaggccatccgcgagggggcgccgctgaagggctacttcgcctggagcctgctggacaacttcgagtgggccgagggctacgacaagcgctttgggctgttctatgtcaacttcgccacccaggagcgccgcctcaagcagagcgggcgctggctgaagggcttcctcgagggcgctgcggaggccggttag

SEQ ID NO: 197 - DNA, 1344 bp, Unknown
  Obtained from environmental sample
atgagcattcaacgcgacgactttcccgccgacttcgtgtggggcaccgccaccgccgcctaccagatcgagggggcggtagacgaggatggccgcgcccccagcatctgggacaccttcagccacacccctggcaagacccgcgacggtgataccggcgacaccgcttgcgaccactaccaccgctaccgcgaggacgtggccctgatgcgggagctgggcgtcaacgcctaccgcttctccatcgcctggccgcgcgtgctgccccaggggcgcggtgtggtcaacggggccgggctcgacttctacgaccgcctggtggatgcgctgctgggagccgggatcaccccctgggctacgctctaccactgggatttgccccaagccctcgaggacgcgggcggctggccccggcgcgacaccgcctacgccctggccgagtacgccgccgtggtggggcggcgcctgggcgaccggctcaagcgctggatcaccctcaacgagccgtggtgctcggcctacttgggctacggcaacggggtgcacgcgcctggtcgccaggacttcgccctctccttgcaggctgcccaccacctgctgctggggcacggcctggcgacagaggcgctgcgggcggcggtgcccggggctcaggtgggggtcaccctcaacctcacccccacccacccggccacgcccgatccccgcgacctcgaggccgcccgccgctacgacggcttcttcaaccgctggtacctcgacccgctgttcggtttcggctacccgctggacatgtgggagctctacgggccgatggtgccccacgtagagccggaggacctgaggcgcatcgccgttcctctcgacttcctgggcatcaactactactcgcgctcggtggtgcggcacgcggagcagggtcccctgctcgtcgagcacgtgcgcccggagggcgagtacacctacatgaactgggaggtctatcccgatggcatccgcgagatcgtggcgcgggtggcccgcgagtaccggccacgttccatctacatcaccgagaacggggcctgctatcccgacggggtggaggacgacggggaaatccacgactccaagcgcctggagtactaccgttcccacctcagcaagtgcgcccaggccatccgcgagggggcgccgctgaagggctacttcgcctggagcctgctggacaacttcgagtgggccgagggctacgacaagcgctttgggctgttctatgtcaacttcgccacccaggagcgccgcctcaagcagagcgggcgctggctgaagggcttcctcgagggcgctgcggaggccggttag

SEQ ID NO: 198 - DNA, 1386 bp, Artificial Sequence
  Obtained from environmental sample, modified with C-terminal His-tag
atgcttcagtttccgaaagattttatttggggagctgcaacttcatcgtatcaaattgaaggaacagcgactggagaagataaaatttactcgatctgggatcacttttcccgcattcctggcaaaatagcgaatggggataatggcgatattgcaattgatcattacaatcgttatgttgaagacatcgcattaatgaaagcgcttcatttgaaagcgtatcgattttcgactagttgggcgagactttattgtgaaacgccagggaagtttaacgaaaaaggtttagatttttataagcgtcttgtaaatgagctgctagagaacggtatcgagccaatgttgaccatttatcattgggatatgccacaagctcttcaagagaaaggtggctgggaaaatcgtgatatcgttcaatacttccaagaatacgctgctttcctttacgagaatcttggggatgtcgtgaaaaaatggattacgcataatgagccgtgggttgtcacctatttaggatatgggaatggcgaacatgccccagggattcaaaactttacatcatttttaaaagcagcacatcatgttcttctctcacacggggaagcggtaaaagcgtttcgagcaatcggtccgaaagatggggaaattggtattacgttgaatttgacacctggatatgcggttgatccgaaagatgaaaaagcagttgatgccgctcgaaaatgggacggctttatgaatcgttggtttttagatcctgtatttaagggacaatatccagcagatatgttagaagtgtataaagattatttaccagacgtttacaaagagggagatttacaaacgattcagcaaccgatcgactttttcggatttaactattattcaacagcaacattaaaagattggaaaaaaggtgaccgtgaaccgatcgtatttgaacatgtgagcacaggaagacctgtgacggatatgaattgggaagtgaatccaaacggtttgtttgatttaatggtgcgattgaaaaaagattatggcgatattccattatacattaccgaaaacggtgctgcatacaaagatcgcgtcaacgaacaaggtgaagtagaagatgatgagcgagttgcttatatacgagagcatttaatcgcttgccaccgcgcgattgaacaaggcgtcaatttaaaaggatattatgtatggtcgctgttcgataattttgagtgggcatttggatatgataagcgctttgggattgtatacgtggattatgaaacgctagagcgcatcccgaaaaagagtgcattatggtataaggaaacgattataaacaacggattgaaagcagaaaaagataaaagatctcatcaccatcaccatcactaa

SEQ ID NO: 199 - protein, 461 aa, Artificial Sequence
  Derived by Lab Evolution
MLQFPKDFIWGAATSSYQIEGTATGEDKIYSIWDHFSRIPGKIANGDNGDIAIDHYNRYVEDIALMKALHLKAYRFSTSWARLYCETPGKFNEKGLDFYKRLVNELLENGIEPMLTIYHWDMPQALQEKGGWENRDIVQYFQEYAAFLYENLGDVVKKWITHNEPWVVTYLGYGNGEHAPGIQNFTSFLKAAHHVLLSHGEAVKAFRAIGPKDGEIGITLNLTPGYAVDPKDEKAVDAARKWDGFMNRWFLDPVFKGQYPADMLEVYKDYLPDVYKEGDLQTIQQPIDFFGFNYYSTATLKDWKKGDREPIVFEHVSTGRPVTDMNWEVNPNGLFDLMVRLKKDYGDIPLYITENGAAYKDRVNEQGEVEDDERVAYIREHLIACHRAIEQGVNLKGYYVWSLFDNFEWRFGYDKRFGIVYVDYETLERIPKKSALWYKETIINNGLKAEKDKRSHHHHHH

SEQ ID NO: 200 - protein, 461 aa, Artificial Sequence
  Derived by Lab Evolution
MLQFPKDFIWGAATSSYQIEGTATGEDKIYSIWDHFSRIPGKIANGDNGDIAIDHYNRYVEDIALMKALHLKAYRFSTSWARLYCETPGKFNEKGLDFYKRLVNELLENGIEPMLTIYHWDMPQALQEKGGWENRDIVQYFQEYAAFLYENLGDVVKKWITHNEPWVVTYLGYGNGEHAPGIQNFTSFLKAAHHVLLSHGEAVKAFRAIGPKDGEIGITLNLTPGYAVDPKDEKAVDAARKWDGFMNRWFLDPVFKGQYPADMLEVYKDYLPDVYKEGDLQTIQQPIDFFGFNYYSTATLKDWKKGDREPIVFEHVSTGRPVTDMNWEVNPNGLFDLMVRLKKDYGDIPLYITENGAAYKDRVNEQGEVEDDERVAYIREHLIACHRAIEQGVNLKGYYVWSLFDNFEWTFGYDKRFGIVYVDYETLERIPKKSALWYKETIINNGLKAEQDKRSHHHHHH

SEQ ID NO: 201 - protein, 461 aa, Artificial Sequence
  Derived by Lab Evolution
MLQFPKDFIWGAATSSYQIEGTATGEDKIYSIWDHFSRIPGKIANGDNGDIAIDHYNRYVEDIALMKALHLKAYRFSTSWARLYCETPGKFNEKGLDFYKRLVNELLENGIEPMLTIYHWDMPQALQEKGGWENRDIVQYFQEYAAFLYENLGDVVKKWITHNEPWVVTYLGYGNGEHAPGIQNFTSFLKAAHHVLLSHGEAVKAFRAIGPKDGEIGITLNLTPGYAVDPKDEKAVDAARKWDGFMNRWFLDPVFKGQYPADMLEVYKDYLPDVYKEGDLQTIQQPIDFFGFNYYSTATLKDWKKGDREPIVFEHVSTGRPVTDMNWEVNPNGLFDLMVRLKKDYGDIPLYITENGAAYKDRVNEQGEVEDDERVAYIREHLIACHRAIEQGVNLKGYYVWSLFDNFEWAFGYDKRFGIVYVDYETLERIPKKSALWYKETIINNGLKAEKDKRSHHHHHH

SEQ ID NO: 202 - protein, 448 aa, Artificial Sequence
  Derived by Lab Evolution
MLQFPKDFIWGAATSSYQIEGTATGEDKIYSIWDHFSRIPGKIANGDNGDIAIDHYNRYVEDIALMKALHLKAYRFSTSWARLYCETPGKFNEKGLDFYKRLVNELLENGIEPMLTIYHWDMPQALQEKGGWENRDIVQYFQEYAAFLYENLGDVVKKWITHNEPWVVTYLGYGNGEHAPGIQNFTSFLKAAHHVLLSHGEAVKAFRAIGPKDGEIGITLNLTPGYAVDPKDEKAVDAARKWDGFMNRWFLDPVFKGQYPADMLEVYKDYLPDVYKEGDLQTIQQPIDFFGFNYYSTATLKDWKKGDREPIVFEHVSTGRPVTDMNWEVNPNGLFDLMVRLKKDYGDIPLYITENGAAYKDRVNEQGEVEDDERVAYIREHLIACHRAIEQGVNLKGYYVWSLFDNFEWAFGYDKRFGIVYVDYETLERIPKKSALWYKETIINNGLK

SEQ ID NO: 203 - protein, 461 aa, Artificial Sequence
  Derived by Lab Evolution
MLQFPKDFIWGAATSSYQIEGTATGEDKIYSIWDHFSRIPGKIANGDNGDIAIDHYNRYVEDIALMKALHLKAYRFSTSWARLYCETPGKFNEKGLDFYKRLVNELLENGIEPMLTIYHWDMPQALQEKGGWENRDIVQYFQEYAAFLYENLGDVVKKWITHNEPWVVTYLGYGNGEHAPGIQNFTSFLKAAHHVLLSHGEAVKAFRAIGPKDGEIGITLNLTPGYAVDPKDEKAVDAARKWDGFMNRWFLDPVFKGQYPADMLEVYKDYLPDVYKEGDLQTIQQPIDFFGFNYYSTATLKDWKKGDREPIVFEHVSTGRPVTDMNWEVNPNGLFDLMVRLKKDYGDIPLYITENGAAYKDRVNEQGEVEDDERVAYIREHLIACHRAIEQGVNLKGYYVWSLFDNFEWAFGYDKRFGIVYVDYETLERIPKKSALWYKETIINNGLKCEKDKRSHHHHHH

SEQ ID NO: 204 - protein, 461 aa, Artificial Sequence
  Derived by Lab Evolution
MLQFPKDFIWGAATSSYQIEGTATGEDKIYSIWDHFSRIPGKIANGDNGDIAIDHYNRYVEDIALMKALHLKAYRFSTSWARLYCETPGKFNEKGLDFYKRLVNELLENGIEPMLTIYHWDMPQALQEKGGWENRDIVQYFQEYAAFLYENLGDVVKKWITHNEPWVVTYLGYGNGEHAPGIQNFTSFLKAAHHVLLSHGEAVKAFRAIGPKDGEIGITLNLTPGYAVDPKDEKAVDAARKWDGFMNRWFLDPVFKGQYPADMLEVYKDYLPDVYKEGDLQTIQQPIDFFGFNYYSTATLKDWKKGDREPIVFEHVSTGRPVTDMNWEVNPNGLFDLMVRLKKDYGDIPLYITENGAAYKDRVNEQGEVEDDERVAYIREHLIACHRAIEQGVNLKGYYVWSLFDNFEWAFGYDKRFGIVYVDYETLERIPKKSALWYKETIINNGLKDEKDKRSHHHHHH

SEQ ID NO: 205 - protein, 461 aa, Artificial Sequence
  Derived by Lab Evolution
MLQFPKDFIWGAATSSYQIEGTATGEDKIYSIWDHFSRIPGKIANGDNGDIAIDHYNRYVEDIALMKFLHLKAYRFSTSWARLYCETPGKFNEKGLDFYKRLVNELLENGIEPMLTIYHWDMPQALQEKGGWENRDIVQYFQEYAAFLYENLGDVVKKWITHNEPWVVTYLGYGNGEHAPGIQNFTSFLKAAHHVLLSHGEAVKAFRAIGPKDGEIGITLNLTPGYAVDPKDEKAVDAARKWDGFMNRWFLDPVFKGQYPADMLEVYKDYLPDVYKEGDLQTIQQPIDFFGFNYYSTATLKDWKKGDREPIVFEHVSTGRPVTDMNWEVNPNGLFDLMVRLKKDYGDIPLYITENGAAYKDRVNEQGEVEDDERVAYIREHLIACHRAIEQGVNLKGYYVWSLFDNFEWAFGYDKRFGIVYVDYETLERIPKKSALWYKETIINNGLKAEKDKRSHHHHHH

SEQ ID NO: 206 - protein, 461 aa, Artificial Sequence
  Derived by Lab Evolution
MLQFPKDFIWGAATSSYQIEGTATGEDKIYSIWDHFSRIPGKIANGDNGDIAIDHYNRYVEDIALMKWLHLKAYRFSTSWARLYCETPGKFNEKGLDFYKRLVNELLENGIEPMLTIYHWDMPQALQEKGGWENRDIVQYFQEYAAFLYENLGDVVKKWITHNEPWVVTYLGYGNGEHAPGIQNFTSFLKAAHHVLLSHGEAVKAFRAIGPKDGEIGITLNLTPGYAVDPKDEKAVDAARKWDGFMNRWFLDPVFKGQYPADMLEVYKDYLPDVYKEGDLQTIQQPIDFFGFNYYSTATLKDWKKGDREPIVFEHVSTGRPVTDMNWEVNPNGLFDLMVRLKKDYGDIPLYITENGAAYKDRVNEQGEVEDDERVAYIREHLIACHRAIEQGVNLKGYYVWSLFDNFEWAFGYDKRFGIVYVDYETLERIPKKSALWYKETIINNGLKAEKDKRSHHHHHH

SEQ ID NO: 207 - protein, 461 aa, Artificial Sequence
  Derived by Lab Evolution
MLQFPKDFIWGAATSSYQIEGTATGEDKIYSIWDHFSRIPGKIANGDNGDIAIDHYNRYVEDIALMKALHLKGYRFSTSWARLYCETPGKFNEKGLDFYKRLVNELLENGIEPMLTIYHWDMPQALQEKGGWENRDIVQYFQEYAAFLYENLGDVVKKWITHNEPWVVTYLGYGNGEHAPGIQNFTSFLKAAHHVLLSHGEAVKAFRAIGPKDGEIGITLNLTPGYAVDPKDEKAVDAARKWDGFMNRWFLDPVFKGQYPADMLEVYKDYLPDVYKEGDLQTIQQPIDFFGFNYYSTATLKDWKKGDREPIVFEHVSTGRPVTDMNWEVNPNGLFDLMVRLKKDYGDIPLYITENGAAYKDRVNEQGEVEDDERVAYIREHLIACHRAIEQGVNLKGYYVWSLFDNFEWAFGYDKRFGIVYVDYETLERIPKKSALWYKETIINNGLKAEKDKRSHHHHHH

SEQ ID NO: 208 - protein, 461 aa, Artificial Sequence
  Derived by Lab Evolution
MLQFPKDFIWGAATSSYQIEGTATGEDKIYSIWDHFSRIPGKIANGDNGDIAIDHYNRYVEDIALMKALHLKSYRFSTSWARLYCETPGKFNEKGLDFYKRLVNELLENGIEPMLTIYHWDMPQALQEKGGWENRDIVQYFQEYAAFLYENLGDVVKKWITHNEPWVVTYLGYGNGEHAPGIQNFTSFLKAAHHVLLSHGEAVKAFRAIGPKDGEIGITLNLTPGYAVDPKDEKAVDAARKWDGFMNRWFLDPVFKGQYPADMLEVYKDYLPDVYKEGDLQTIQQPIDFFGFNYYSTATLKDWKKGDREPIVFEHVSTGRPVTDMNWEVNPNGLFDLMVRLKKDYGDIPLYITENGAAYKDRVNEQGEVEDDERVAYIREHLIACHRAIEQGVNLKGYYVWSLFDNFEWAFGYDKRFGIVYVDYETLERIPKKSALWYKETIINNGLKAEKDKRSHHHHHH

SEQ ID NO: 209 - protein, 461 aa, Artificial Sequence
  Derived by Lab Evolution
MLQFPKDFIWGAATSSYQIEGTATGEDKIYSIWDHFSRIPGKIANGDNGDIAIDHYNRYVEDIALMKALHLKAYRFSTSWARLYCETPGKFNEKGLDFYKRLVNELLENGIEPMLTIYHWDMPQALQEKGGWENRDIVQYFQEYAAFLYENLGDVVKKWITHNEPWVVTYLGYGNGEHAPGIQNFTSFLKAAHHVLLSHGEAVKAFRAIGPKDGEIGITLNLTPGYAVDPKDEKAVDAARKWDGFMNRWFLDPVFKGQYPADMLEVYKDYLPDVYKEGDLQTIQQPIDFFGFNYYSTATLKSWKKGDREPIVFEHVSTGRPVTDMNWEVNPNGLFDLMVRLKKDYGDIPLYITENGAAYKDRVNEQGEVEDDERVAYIREHLIACHRAIEQGVNLKGYYVWSLFDNFEWAFGYDKRFGIVYVDYETLERIPKKSALWYKETIINNGLKAEKDKRSHHHHHH

SEQ ID NO: 210 - protein, 461 aa, Artificial Sequence
  Derived by Lab Evolution
MLQFPKDFIWGAATSSYQIEGTATGEDKIYSIWDHFSRIPGKIANGDNGDIAIDHYNRYVEDIALMKALHLKAYRFSTSWARLYCETPGKFNEKGLDFYKRLVNELLENGIEPMLTIYHWDMPQALQEKGGWENRDIVQYFQEYAAFLYENLGDVVKKWITHNEPWVVTYLGYGNGEHAPGIQNFTSFLKAAHHVLLSHGEAVKAFRAIGPKDGEIGITLNLTPGYAVDPKDEKAVDAARKWDGFMNRWFLDPVFKGQYPADMLEVYKDYLPDVYKEGDLQTIQQPIDFFGFNYYSTATLKDWKKGDREPIVFEHVSTGRPVTDMNWEVNPNGLFDLMVRLKKDYGDIPLYITENGAAYKDRVNEQGEVEDDERVAYIREHLIACHRAIEQGVNLKGYYVWSLFDNFEWAFGYSKRFGIVYVDYETLERIPKKSALWYKETIINNGLKAEKDKRSHHHHHH

SEQ ID NO: 211 - protein, 461 aa, Artificial Sequence
  Derived by Lab Evolution
MLQFPKDFIWGAATSSYQIEGTATGEDKIYSIWDHFSRIPGKIANGDNGDIAIDHYNRYVEDIALMKALHLKAYRFSTSWARLYCETPGKFNEKGLDFYKRLVNELLENGIEPMLTIYHWDMPQALQEKGGWENRDIVQYFQEYAAFLYENLGDVVKKWITHNEPWVVTYLGYGNGEHAPGIQNFTSFLKAAHHVLLSHGEAVKAFRAIGPKDGEIGITLNLTPGYAVDPKDEKAVDAARKWDGFMNRWFLDPVFKGQYPADMLEVYKDYLPDVYKEGDLQTIQQPIDFFGFNYYSTATLKDWKKGDREPIVFEHVSTGRPVTDMNWEVNPNGLFDLMVRLKKDYGDIPLYITENGAAYKDRVNEQGEVEDDERVAYIREHLIACHRAIEQGVNLKGYYVWSLFDNFEWAFGYTKRFGIVYVDYETLERIPKKSALWYKETIINNGLKAEKDKRSHHHHHH

SEQ ID NO: 212 - protein, 461 aa, Artificial Sequence
  Derived by Lab Evolution
MLQFPKGFIWGAATSSYQIEGTATGEDKIYSIWDHFSRIPGKIANGDNGDIAIDHYNRYVEDIALMKALHLKAYRFSTSWARLYCETPGKFNEKGLDFYKRLVNELLENGIEPMLTIYHWDMPQALQEKGGWENRDIVQYFQEYAAFLYENLGDVVKKWITHNEPWVVTYLGYGNGEHAPGIQNFTSFLKAAHHVLLSHGEAVKAFRAIGPKDGEIGITLNLTPGYAVDPKDEKAVDAARKWDGFMNRWFLDPVFKGQYPADMLEVYKDYLPDVYKEGDLQTIQQPIDFFGFNYYSTATLKDWKKGDREPIVFEHVSTGRPVTDMNWEVNPNGLFDLMVRLKKDYGDIPLYITENGAAYKDRVNEQGEVEDDERVAYIREHLIACHRAIEQGVNLKGYYVWSLFDNFEWAFGYDKRFGIVYVDYETLERIPKKSALWYKETIINNGLKAEKDKRSHHHHHH

SEQ ID NO: 213 - protein, 461 aa, Artificial Sequence
  Derived by Lab Evolution
MLQFPKHFIWGAATSSYQIEGTATGEDKIYSIWDHFSRIPGKIANGDNGDIAIDHYNRYVEDIALMKALHLKAYRFSTSWARLYCETPGKFNEKGLDFYKRLVNELLENGIEPMLTIYHWDMPQALQEKGGWENRDIVQYFQEYAAFLYENLGDVVKKWITHNEPWVVTYLGYGNGEHAPGIQNFTSFLKAAHHVLLSHGEAVKAFRAIGPKDGEIGITLNLTPGYAVDPKDEKAVDAARKWDGFMNRWFLDPVFKGQYPADMLEVYKDYLPDVYKEGDLQTIQQPIDFFGFNYYSTATLKDWKKGDREPIVFEHVSTGRPVTDMNWEVNPNGLFDLMVRLKKDYGDIPLYITENGAAYKDRVNEQGEVEDDERVAYIREHLIACHRAIEQGVNLKGYYVWSLFDNFEWAFGYDKRFGIVYVDYETLERIPKKSALWYKETIINNGLKAEKDKRSHHHHHH

SEQ ID NO: 214 - protein, 461 aa, Artificial Sequence
  Derived by Lab Evolution
MLQFPKDFIWGAATSSYQIEGTATGEDKIYSIWDHFSRIPGKIANGDNGDIAIDHYNRYVEDIALMKALHLKAYRFSTSWARLYCETPGKFNEKGLDFYKRLVNGLLENGIEPMLTIYHWDMPQALQEKGGWENRDIVQYFQEYAAFLYENLGDVVKKWITHNEPWVVTYLGYGNGEHAPGIQNFTSFLKAAHHVLLSHGEAVKAFRAIGPKDGEIGITLNLTPGYAVDPKDEKAVDAARKWDGFMNRWFLDPVFKGQYPADMLEVYKDYLPDVYKEGDLQTIQQPIDFFGFNYYSTATLKDWKKGDREPIVFEHVSTGRPVTDMNWEVNPNGLFDLMVRLKKDYGDIPLYITENGAAYKDRVNEQGEVEDDERVAYIREHLIACHRAIEQGVNLKGYYVWSLFDNFEWAFGYDKRFGIVYVDYETLERIPKKSALWYKETIINNGLKAEKDKRSHHHHHH

SEQ ID NO: 215 - protein, 461 aa, Artificial Sequence
  Derived by Lab Evolution
MLQFPKDFIWGAATSSYQIEGTATGEDKIYSIWDHFSRIPGKIANGDNGDIAIDHYNRYVEDIALMKALHLKAYRFSTSWARLYCETPGKFNEKGLDFYKRLVNELLENGIEPMLTIYHWDMPQALQEKGGWENRDIVQYFQEYAAFLYENLGDVVKKWITHNEPWVVTYLGYGNGEHAPGIQNFTSFLKAAHHVLLSHGEAVKAFRAIGPKDGEIGITLNLTPGYAVDPKDEKAVDAARKWDGFMNRWFLDPVFKGQYPADMLEVYKDYLPDVYKEGDLQTIQQPIDFFGFNYYSTATLKDWKKGDREPIVFEHVSTGRPVTDMNWEVNPNGLFDLMVRLKKDYGDIPLYITENGAAYKDRVNEQGEVEDDERVAYIREHLIACHRAIEQGVNLKGYYVWSLFDNFEWAFGYDKRFGIVYVDYETLDRIPKKSALWYKETIINNGLKAEKDKRSHHHHHH

SEQ ID NO: 216 - protein, 461 aa, Artificial Sequence
  Derived by Lab Evolution
MLQFPKDFIWGAATSSYQIEGTATGEDKIYSIWDHFSRIPGKIANGDNGDIAIDHYNRYVEDIALMKALHLKAYRFSTSWARLYCETPGKFNEKGLDFYKRLVNELLENGIEPMLTIYHWDMPQALQEKGGWENRDIVQYFQEYAAFLYENLGDVVKKWITHNEPWVVTYLGYGNGEHAPGIQNFTSFLKAAHHVLLSHGEAVKAFRAIGPKDGEIGITLNLTPGYAVDPKDEKAVDAARKWDGFMNRWFLDPVFKGQYPADMLEVYKDYLPDVYKEGDLQTIQQPIDFFGFNYYSTATLKDWKKGDREPIVFEHVSTGRPVTDMNWEVNPNGLFDLMVRLKKDYGDIPLYITENGAAYKDRVNEQGEVEDDERVAYIREHLIACHRAIEQGVNLKGYYVWSLFDNFEWAFGYDKRFGIVYVDYETLIRIPKKSALWYKETIINNGLKAEKDKRSHHHHHH

SEQ ID NO: 217 - protein, 461 aa, Artificial Sequence
  Derived by Lab Evolution
MLQFPKDFIWGAATSSYQIEGTATGEDKIYSIWDHFSRIPGKIANGDNGDIAIDHYNRYVEDIALMKALHLKAYRFSTSWARLYCETPGKFNEKGLDFYKRLVNELLENGIEPMLTIYHWDMPQALQEKGGWENRDIVQYFQEYAAFLYENLGDVVKKWITHNEPWVVTYLGYGNGEHAPGIQNFTSFLKAAHHVLLSHGEAVKAFRAIGPKDGEIGITLNLTPGYAVDPKDEKAVDAARKWDGFMNRWFLDPVFKGQYPADMLEVYKDYLPDVYKEGDLQTIQQPIDFFGFNYYSTATLKDWKKGDREPIVFEHVSTGRPVTDMNWEVNPNGLFDLMVRLKKDYGDIPLYITENGAAYKDRVNEQGEVEDDERVAYIREHLIACHRAIEQGVNLKGYYVWSLFDNFEWAFGYDKRFGIVYVDYETLERIPKKSALWYKETIINNGLKACKDKRSHHHHHH

SEQ ID NO: 218 - protein, 461 aa, Artificial Sequence
  Derived by Lab Evolution
MLQFPKDFIWGAATSSYQIEGTATGEDKIYSIWDHFSRIPGKIANGDNGDIAIDHYNRYVEDIALMKALHLKAYRFSTSWARLYCETPGKFNEKGLDFYKRLVNELLENGIEPMLTIYHWDMPQALQEKGGWENRDIVQYFQEYAAFLYENLGDVVKKWITHNEPWVVTYLGYGNGEHAPGIQNFTSFLKAAHHVLLSHGEAVKAFRAIGPKDGEIGITLNLTPGYAVDPKDEKAVDAARKWDGFMNRWFLDPVFKGQYPADMLEVYKDYLPDVYKEGDLQTIQQPIDFFGINYYSTATLKDWKKGDREPIVFEHVSTGRPVTDMNWEVNPNGLFDLMVRLKKDYGDIPLYITENGAAYKDRVNEQGEVEDDERVAYIREHLIACHRAIEQGVNLKGYYVWSLFDNFEWAFGYDKRFGIVYVDYETLERIPKKSALWYKETIINNGLKAEKDKRSHHHHHH

SEQ ID NO: 219 - protein, 461 aa, Artificial Sequence
  Derived by Lab Evolution
MLQFPKDFIWGAATSSYQIEGTATGEDKIYSIWDHFSRIPGKIANGDNGDIAIDHYNRYVEDIALMKALHLKAYRFSTSWARLYCETPGKFNEKGLDFYKRLVNELLENGIEPMLTIYHWDMPQALQEKGGWENRDIVQYFQEYAAFLYENLGDVVKKWITHNEPWVVTYLGYGNGEHAPGIQNFTSFLKAAHHVLLSHGEAVKAFRAIGPKDGEIGITLNLTPGYAVDPKDEKAVDAARKWDGFMNRWFLDPVFKGQYPADMLEVYKDYLPDVYKEGDLQTIQQPIDFFGVNYYSTATLKDWKKGDREPIVFEHVSTGRPVTDMNWEVNPNGLFDLMVRLKKDYGDIPLYITENGAAYKDRVNEQGEVEDDERVAYIREHLIACHRAIEQGVNLKGYYVWSLFDNFEWAFGYDKRFGIVYVDYETLERIPKKSALWYKETIINNGLKAEKDKRSHHHHHH

SEQ ID NO: 220 - protein, 461 aa, Artificial Sequence
  Derived by Lab Evolution
MLQFPKDFIWGAATSSYQIEGTATGEDKIYSIWDHFSRIPGKIANGDNGDIAIDHYNRYVEDIALMKALHLKAYRFSTSWARLYCETPGKFNEKGLDFYKRLVNELLENGIEPMLTIYHWDMPQALQEKGGWENRDIVQYFQEYAAFLYENLGDVVKKWITHNEPWVVTYLGYGNGEHAPGIQNFTSFLKAAHHVLLSHGEAVKAFRAIGPKDGEIGIALNLTPGYAVDPKDEKAVDAARKWDGFMNRWFLDPVFKGQYPADMLEVYKDYLPDVYKEGDLQTIQQPIDFFGFNYYSTATLKDWKKGDREPIVFEHVSTGRPVTDMNWEVNPNGLFDLMVRLKKDYGDIPLYITENGAAYKDRVNEQGEVEDDERVAYIREHLIACHRAIEQGVNLKGYYVWSLFDNFEWAFGYDKRFGIVYVDYETLERIPKKSALWYKETIINNGLKAEKDKRSHHHHHH

SEQ ID NO: 221 - protein, 461 aa, Artificial Sequence
  Derived by Lab Evolution
MLQFPKDFIWGAATSSYQIEGTATGEDKIYSIWDHFSRIPGKIANGDNGDIAIDHYNRYVEDIALMKALHLKAYRFSTSWARLYCETPGKFNEKGLDFYKRLVNELLENGIEPMLTIYHWDMPQALQEKGGWENRDIVQYFQEYAAFLYENLGDVVKKWITHNEPWVVTYLGYGNGEHAPGIQNFTSFLKAAHHVLLSHGEAVKAFRAIGPKDGEIGITLNLTPGYAVDPKDEKAVDAARKWDGFMNRWFLDPVFKGQYPADMLEVYKDYLPDVYKEGDLQTIQQPIDFFGFNYYSTATLKDWKKGDREPIVFEHVSTGRPVTDMNWEVNPNGLFDLMVRLKKDYGDIPLYITENGAAYKDRVNEQGEVEDDERVAYIREHLIACHRAIEQGVNLKGYYVWSLFDNFEWAFGYDKRFGIVYVDYETLERIPKKSALWYKETIINNGLKEEKDKRSHHHHHH

SEQ ID NO: 222 - protein, 461 aa, Artificial Sequence
  Derived by Lab Evolution
MLQFPKDFIWGAATSSYQIEGTATGEDKIYSIWDHFSRIPGKIANGDNGDIAIDHYNRYVEDIALMKALHLKAYRFSTSWARLYCETPGKFNEKGLDFYKRLVNELLENGIEPMLTIYHWDMPQALQEKGGWENRDIVQYFQEYAAFLYENLGDVVKKWITHNEPWVVTYLGYGNGEHAPGIQNFTSFLKAAHHVLLSHGEAVKAFRAIGPKDGEIGITLNLTPGYAVDPKDEKAVDAARKWDGFMNRWFLDPVFKGQYPADMLEVYKDYLPDVYKEGDLQTIQQPIDFFGFNYYSTATLKDWKKGDREPIVFEFVSTGRPVTDMNWEVNPNGLFDLMVRLKKDYGDIPLYITENGAAYKDRVNEQGEVEDDERVAYIREHLIACHRAIEQGVNLKGYYVWSLFDNFEWAFGYDKRFGIVYVDYETLERIPKKSALWYKETIINNGLKAEKDKRSHHHHHH

SEQ ID NO: 223 - protein, 461 aa, Artificial Sequence
  Derived by Lab Evolution
MLQFPKDFIWGAATSSYQIEGTATGEDKIYSIWDHFSRIPGKIANGDNGDIAIDHYNRYVEDIALMKALHLKAYRFSTSWARLYCETPGKFNEKGLDFYKRLVNELLENGIEPMLTIYHWDMPQALQEKGGWENRDIVQYFQEYAAFLYENLGDVVKKWITHNEPWVVTYLGYGNGEHAPGIQNFTSFLKAAHHVLLSHGEAVKAFRAIGPKDGEIGITLNLTPGYAVDPKDEKAVDAARKWDGFMNRWFLDPVFKGQYPADMLEVYKDYLPDVYKEGDLQTIQQPIDFFGFNYYSTATLKDWKKGDREPIVFEIVSTGRPVTDMNWEVNPNGLFDLMVRLKKDYGDIPLYITENGAAYKDRVNEQGEVEDDERVAYIREHLIACHRAIEQGVNLKGYYVWSLFDNFEWAFGYDKRFGIVYVDYETLERIPKKSALWYKETIINNGLKAEKDKRSHHHHHH

SEQ ID NO: 224 - protein, 461 aa, Artificial Sequence
  Derived by Lab Evolution
MLQFPKDFIWGAATSSYQIEGTATGEDKIYSIWDHFSRIPGKIANGDNGDIAIDHYNRYVEDIALMKALHLKAYRFSTSWARLYCETPGKFNEKGLDFYKRLVNELLENGIEPMLTIYHWDMPQALQEKGGWENRDIVQYFQEYAAFLYENLGDVVKKWITHNEPWVVTYLGYGNGEHAPGIQNFTSFLKAAHHVLLSHGEAVKAFRAIGPKDGEIGITLNLTPGYAVDPKDEKAVDAARKWDGFMNRWFLDPVFKGQYPADMLEVYKDYLPDVYKEGDLQTIQQPIDFFGFNYYSTATLKDWKKGDREPIVFEKVSTGRPVTDMNWEVNPNGLFDLMVRLKKDYGDIPLYITENGAAYKDRVNEQGEVEDDERVAYIREHLIACHRAIEQGVNLKGYYVWSLFDNFEWAFGYDKRFGIVYVDYETLERIPKKSALWYKETIINNGLKAEKDKRSHHHHHH

SEQ ID NO: 225 - protein, 461 aa, Artificial Sequence
  Derived by Lab Evolution
MLQFPKDFIWGAATSSYQIEGTATGEDKIYSIWDHFSRIPGKIANGDNGDIAIDHYNRYVEDIALMKALHLKAYRFSTSWARLYCETPGKFNEKGLDFYKRLVNELLENGIEPMLTIYHWDMPQALQEKGGWENRDIVQYFQEYAAFLYENLGDVVKKWITHNEPWVVTYLGYGNGEHAPGIQNFTSFLKAAHHVLLSHGEAVKAFRAIGPKDGEVGIALNLTPGYAVDPKDEKAVDAARKWDGFKNRWFLDPVFKGQYPADMLEVYKDYLPDVYKEGDLQTIQQPIDFFGFNYYSTATLKDWKKGDREPIVFEHVSTGRPVTDMNWEVNPNGLFDLMVRLKKDYGDIPLYITENGAAYKDRVNEQGEVEDDERVAYIREHLIACHRAIEQGVNLKGYYVWSLFDNFEWAFGYDKRFGIVYVDYETLERIPKKSALWYKETIINNGLKAEKDKRSHHHHHH

SEQ ID NO: 226 - protein, 461 aa, Artificial Sequence
  Derived by Lab Evolution
MLQFPKDFIWGAATSSYQIEGTATGEDKIYSIWDHFSRIPGKIANGDNGDIAIDHYNRYVEDIALMKALHLKAYRFSTSWARLYCETPGKFNEKGLDFYKRLVNELLENGIEPMLTIYHWDMPQALQEKGGWENRDIVQYFQEYAAFLYENLGDVVKKWITHNEPWVVTYLGYGNGEHAPGIQNFTSFLKAAHHVLLSHGEAVKAFRAIGPKDGEIGITLNLTPGYAVDPKDEKAVDAARKWDGFMNRWFLDPVFKGQYPADMLEVYKDYLPDVYKEGDLQTIQQPIDFFGFNYYSTATLKDWKKGDREPIVFEHVSTGRPVTDMNWEVNPNGLFDLMVRLKKDYGDIPLYITENGAAYKDRVNEQGEVEDDERVAYLREHLIACHRAIEQGVNLKGYYVWSLFDNFEWAFGYDKRFGIVYVDYETLERIPKKSALWYKETIINNGLKAEKDKRSHHHHHH

SEQ ID NO: 227 - protein, 461 aa, Artificial Sequence
  Derived by Lab Evolution
MLQFPKDFIWGAATSSYQIEGTATGEDKIYSIWDHFSRIPGKIANGDNGDIAIDHYNRYVEDVALMKALHLKAYRFSTSWARLYCETPGKFNEKGLDFYKRLVNELLENGIEPMLTIYHWDMPQALQEKGGWENRDIVQYFQEYAAFLYENLGDVVKKWITHNEPWVVTYLGYGNGEHAPGIQNFTSFLKAAHHVLLSHGEAVKAFRAIGPKDGEIGITLNLTPGYAVDPKDEKAVDAARKWDGFMNRWFLDPVFKGQYPADMLEVYKDYLPDVYKEGDLQTIQQPIDFFGFNYYSTATLKDWKKGDREPIVFEHVSTGRPVTDMNWEVNPNGLFDLMVRLKKDYGDIPLYITENGAAYKDRVNEQGEVEDDERVAYIREHLIACHRAIEQGVNLKGYYVWSLFDNFEWAFGYDKRFGIVYVDYETLERIPKKSALWYKETIINNGLKAEKDKRSHHHHHH

SEQ ID NO: 228 - protein, 461 aa, Artificial Sequence
  Derived by Lab Evolution
MLQFPKDFIWGAATSSYQIEGTATGEDKIYSIWDHFSRIPGKIANGDNGDIAIDHYNRYVEDIALMKALHLKAYRFSTSWARLYCETPGKFNEKGLDFYKRLVNELLENGIEPMLTIYHWDMPQALQEKGGWENRDIVQYFQEYAAFLYENLGDVVKKWITHNEPWVVTYLGYGNGEHAPGIQNFTSFLKAAHHVLLSHGEAVKAFRAIGPKDGEIGITLNLTPGYAVDPKDEKAVDAARKWDGFMNRWFLDPVFKGQYPADMLEVYKDYLPDVYKEGDLQTIQQPIDFFGFNYYSTATLKDWKKGDREPIVFEHVSTGRPVTDMNWEVNPNGLFDLMVRLKKDYGDIPLYITENGAAYKDRVNEQGEVEDDERVAYIREHLIACHRAIEQGVNLKGYYVWSLFDNFEWAFGYDARFGIVYVDYETLERIPKKSALWYKETIINNGLKAEKDKRSHHHHHH

SEQ ID NO: 229 - protein, 461 aa, Artificial Sequence
  Derived by Lab Evolution
MLQFPKDFIWGAATSSYQIEGTATGEDKIYSIWDHFSRIPGKIANGDNGDIAIDHYNRYVEDIALMKALHLKAYRFSTSWARLYCETPGKFNEKGLDFYKRLVNELLENGIEPMLTIYHWDMPQALQEKGGWENRDIVQYFQEYAAFLYENLGDVVKKWITHNEPWVVTYLGYGNGEHAPGIQNFTSFLKAAHHVLLSHGEAVKAFRAIGPKDGEIGITLNLTPGYAVDPKDEKAVDAARKWDGFMNRWFLDPVFKGQYPADMLEVYKDYLPDVYKEGDLQTIQQPIDFFGFNYYSTATLKDWKKGDREPIVFEHVSTGRPVTDMNWEVNPNGLFDLMVRLKKDYGDIPLYITENGAAYKDRVNEQGEVEDDERVAYIREHLIACHRAIEQGVNLKGYYVWSLFDNFEWAFGYDKRFGIVYVDYETLERIPKKSALWYKETIINNGLKAEDDKRSHHHHHH

SEQ ID NO: 230 - protein, 461 aa, Artificial Sequence
  Derived by Lab Evolution
MLQFPVDFIWGAATSSYQIEGTATGEDKIYSIWDHFSRIPGKIANGDNGDIAIDHYNRYVEDIALMKALHLKAYRFSTSWARLYCETPGKFNEKGLDFYKRLVNELLENGIEPMLTIYHWDMPQALQEKGGWENRDIVQYFQEYAAFLYENLGDVVKKWITHNEPWVVTYLGYGNGEHAPGIQNFTSFLKAAHHVLLSHGEAVKAFRAIGPKDGEIGITLNLTPGYAVDPKDEKAVDAARKWDGFMNRWFLDPVFKGQYPADMLEVYKDYLPDVYKEGDLQTIQQPIDFFGFNYYSTATLKDWKKGDREPIVFEHVSTGRPVTDMNWEVNPNGLFDLMVRLKKDYGDIPLYITENGAAYKDRVNEQGEVEDDERVAYIREHLIACHRAIEQGVNLKGYYVWSLFDNFEWAFGYDKRFGIVYVDYETLERIPKKSALWYKETIINNGLKAEKDKRSHHHHHH

SEQ ID NO: 231 - protein, 461 aa, Artificial Sequence
  Derived by Lab Evolution
MLQFPKDFIWGAATSSYQIEGTATGEDKIYSIWDHFSRIPGKIANGDNGDIAIDHYNRYVEDIALMKALHLKAYRFSTSWARLYCETPGKFNEKGLDFYKRLVNELLENGIEPMLTIYHWDMPQALQEKGGWENRDIVQYFQEYAAFLYENLGDVVKKWITHNEPWVVTYLGYGNGEHAPGIQNFTSFLKAAHHVLLSHGEAVKAFRAIGPKDGEIGITLNLTPGYAVDPKDEKAVDAARKWDGFMNRWFLDPVFKGQYPADMLEVYKDYLPDVYKEGDLQTIQQPIDFFGFNYYSTATLKDWKKGDREPIVFEHVSTGRPVTDMNWEVNPNGLFDLMVRLKKDYGDIPLYITENGAAYKDRVNEQGEVEDDERVAYIREHLIACHRAIEQGVNLKGYYVWSLFDNFEWAFGYDKRFGIVYVDYETGERIPKKSALWYKETIINNGLKAEKDKRSHHHHHH

SEQ ID NO: 232 - protein, 461 aa, Artificial Sequence
  Derived by Lab Evolution
MLQFPKDFIWGAATSSYQIEGTATGEDKIYSIWDHFSRIPGKIANGDNGDIAIDHYNRYVEDIALMKALHLKAYRFSTSWARLYCETPGKFNEKGLDFYKRLVNELLENGIEPMLTIYHWDMPQALQEKGGWENRDIVQYFQEYAAFLYENLGDVVKKWITHNEPWVVTYLGYGNGEHAPGIQNFTSFLKAAHHVLLSHGEAVKAFRAIGPKDGEIGITLNLTPGYAVDPKDEKAVDAARKWDGFMNRWFLDPVFKGQYPADMLEVYKDYLPDVYKEGDLQTIQQPIDFFGFNYYSTATLKDWKKGDREPIVFEHVSTGRPVTDMNWEVNPNGLFDLMVRLKKDYGDIPLYITENGAAYKDRVNEQGEVEDDERVAYIREHLIACHRAIEQGVNLKGYYVWSLFDNFEWAFGYDKRFGIVYVDYETLERIPKKSALWYKETIINNGFKAEKDKRSHHHHHH

SEQ ID NO: 233 - protein, 461 aa, Artificial Sequence
  Derived by Lab Evolution
MLQFPKDFIWGAATSSYQIEGTATGEDKIYSIWDHFSRIPGKIANGDNGDIAIDHYNRYVEDIALMKALHLKAYRFSTSWARLYCETPGKFNEKGLDFYKRLVNELLENGIEPMLTIYHWDMPQALQEKGGWENRDIVQYFQEYAAFLYENLGDVVKKWITHNEPWVVTYLGYGNGEHAPGIQNFTSFLKAAHHVLLSHGEAVKAFRAIGPKDGEIGITLNLTPGYAVDPKDEKAVDAARKWDGFHNRWFLDPVFKGQYPADMLEVYKDYLPDVYKEGDLQTIQQPIDFFGFNYYSTATLKDWKKGDREPIVFEHVSTGRPVTDMNWEVNPNGLFDLMVRLKKDYGDIPLYITENGAAYKDRVNEQGEVEDDERVAYIREHLIACHRAIEQGVNLKGYYVWSLFDNFEWAFGYDKRFGIVYVDYETLERIPKKSALWYKETIINNGLKAEKDKRSHHHHHH

SEQ ID NO: 234 - protein, 461 aa, Artificial Sequence
  Derived by Lab Evolution
MLQFPKDFIWGAATSSYQIEGTATGEDKIYSIWDHFSRIPGKIANGDNGDIAIDHYNRYVEDIALMKALHLKAYRFSTSWARLYCETPGKFNEKGLDFYKRLVNELLENGIEPMLTIYHWDMPQALQEKGGWENRDIVQYFQEYAAFLYENLGDVVKKWITHNEPWVVTYLGYGNGEHAPGIQNFTSFLKAAHHVLLSHGEAVKAFRAIGPKDGEIGITLNLTPGYAVDPKDEKAVDAARKWDGFKNRWFLDPVFKGQYPADMLEVYKDYLPDVYKEGDLQTIQQPIDFFGFNYYSTATLKDWKKGDREPIVFEHVSTGRPVTDMNWEVNPNGLFDLMVRLKKDYGDIPLYITENGAAYKDRVNEQGEVEDDERVAYIREHLIACHRAIEQGVNLKGYYVWSLFDNFEWAFGYDKRFGIVYVDYETLERIPKKSALWYKETIINNGLKAEKDKRSHHHHHH

SEQ ID NO: 235 - protein, 461 aa, Artificial Sequence
  Derived by Lab Evolution
MLQFPKDFIWGAATSSYQIEGTATGEDKIYSIWDHFSRIPGKIANGDNGDIAIDHYNRYVEDIALMKALHLKAYRFSTSWARLYCETPGKFNEKGLDFYKRLVNELLENGIEPMLTIYHWDMPQALQEKGGWENRDIVQYFQEYAAFLYENLGDVVKKWITHNEPWVVTYLGYGNGEHAPGIQNFTSFLKAAHHVLLSHGEAVKAFRAIGPKDGEIGITLNLTPGYAVDPKDEKAVDAARKWDGFMNRWFLDPVFKGQYPADMLEVYKDYLPDVYKEGDLQTIQQPIDFFGFNYYSTATLKDWKKGDREPIVFEHVSTGRPVTDTNWEVNPNGLFDLMVRLKKDYGDIPLYITENGAAYKDRVNEQGEVEDDERVAYIREHLIACHRAIEQGVNLKGYYVWSLFDNFEWAFGYDKRFGIVYVDYETLERIPKKSALWYKETIINNGLKAEKDKRSHHHHHH

SEQ ID NO: 236 - protein, 461 aa, Artificial Sequence
  Derived by Lab Evolution
MLQFPKDFIWGAATSSYQIEGTATGEDKIYSIWDHFSRIPGKIANGDNGDIAIDHYNRYVEDIALMKALHLKAYRFSTSWARLYCETPGKFNEKGLDFYKRLVNELLENGIEPMLTIYHWDMPQALQEKGGWENRDIVQYFQEYAAFLYENLGDVVKKWITHNEPWVVTYLGYGSGEHAPGIQNFTSFLKAAHHVLLSHGEAVKAFRAIGPKDGEIGITLNLTPGYAVDPKDEKAVDAARKWDGFMNRWFLDPVFKGQYPADMLEVYKDYLPDVYKEGDLQTIQQPIDFFGFNYYSTATLKDWKKGDREPIVFEHVSTGRPVTDMNWEVNPNGLFDLMVRLKKDYGDIPLYITENGAAYKDRVNEQGEVEDDERVAYIREHLIACHRAIEQGVNLKGYYVWSLFDNFEWAFGYDKRFGIVYVDYETLERIPKKSALWYKETIINNGLKAEKDKRSHHHHHH

SEQ ID NO: 237 - protein, 461 aa, Artificial Sequence
  Derived by Lab Evolution
MLQFPKDFIWGAATSSYQIEGTATGEDKIYSIWDHFSRIPGKIANGDNGDIAIDHYNRYVEDIALMKALHLKAYRFSTSWARLYCETPGKFNEKGLDFYKRLVNELLENGIEPMLTIYHWDMPQALQEKGGWENRDIVQYFQEYAAFLYENLGDVVKKWITHNEPWVVTYLGYGNGEHAPGIQNFTSFLKAAHHVLLSHGEAVKAFRAIGPKDGEIGITLNLTPGYAVDPKDEKAVDAARKWDGFMNRWFLDPVFKGQYPADMLEVYKDYLPDVYKEGDLQTIQQPIDFFGFNYYSTATLKDWKKGDREPIVFEHVSTGRPVTDMGWEVNPNGLFDLMVRLKKDYGDIPLYITENGAAYKDRVNEQGEVEDDERVAYIREHLIACHRAIEQGVNLKGYYVWSLFDNFEWAFGYDKRFGIVYVDYETLERIPKKSALWYKETIINNGLKAEKDKRSHHHHHH

SEQ ID NO: 238 - protein, 461 aa, Artificial Sequence
  Derived by Lab Evolution
MLQFPKDFIWGAATSSYQIEGTATGEDKIYSIWDHFSRIPGKIANGDNGDIAIDHYNRYVEDIALMKALHLKAYRFSTSWARLYCETPGKFNEKGLDFYKRLVNELLENGIEPMLTIYHWDMPQALQEKGGWENRDIVQYFQEYAAFLYENLGDVVKKWITHNEPWVVTYLGYGNGEHAPGIQNFTSFLKAAHHVLLSHGEAVKAFRAIGPKDGEIGITLNLTPGYAVDPKDEKAVDAARKWDGFMNRWFLDPVFKGQYPADMLEVYKDYLPDVYKEGDLQTIQQPIDFFGFNYYSTATLKDWKKGDREPIVFEHVSTGRPVTDMNWEVNPEGLFDLMVRLKKDYGDIPLYITENGAAYKDRVNEQGEVEDDERVAYIREHLIACHRAIEQGVNLKGYYVWSLFDNFEWAFGYDKRFGIVYVDYETLERIPKKSALWYKETIINNGLKAEKDKRSHHHHHH

SEQ ID NO: 239 - protein, 461 aa, Artificial Sequence
  Derived by Lab Evolution
MLQFPKDFIWGAATSSYQIEGTATGEDKIYSIWDHFSRIPGKIANGDNGDIAIDHYNRYVEDIALMKALHLKAYRFSTSWARLYCETPGKFNEKGLDFYKRLVNELLENGIEPMLTIYHWDMPQALQEKGGWENRDIVPYFQEYAAFLYENLGDVVKKWITHNEPWVVTYLGYGNGEHAPGIQNFTSFLKAAHHVLLSHGEAVKAFRAIGPKDGEIGITLNLTPGYAVDPKDEKAVDAARKWDGFMNRWFLDPVFKGQYPADMLEVYKDYLPDVYKEGDLQTIQQPIDFFGFNYYSTATLKDWKKGDREPIVFEHVSTGRPVTDMNWEVNPNGLFDLMVRLKKDYGDIPLYITENGAAYKDRVNEQGEVEDDERVAYIREHLIACHRAIEQGVNLKGYYVWSLFDNFEWAFGYDKRFGIVYVDYETLERIPKKSALWYKETIINNGLKAEKDKRSHHHHHH

SEQ ID NO: 240 - protein, 461 aa, Artificial Sequence
  Derived by Lab Evolution
MLQFPKDFIWGAATSSYQIEGTATGEDKIYSIWDHFSRIPGKIANGDNGDIAIDHYNRYVEDIALMKALHLKAYRFSTSWARLYCETPGKFNEKGLDFYKRLVNELLENGIEPMLTIYHWDMPQALQEKGGWENRDIVQYFKEYAAFLYENLGDVVKKWITHNEPWVVTYLGYGNGEHAPGIQNFTSFLKAAHHVLLSHGEAVKAFRAIGPKDGEIGITLNLTPGYAVDPKDEKAVDAARKWDGFMNRWFLDPVFKGQYPADMLEVYKDYLPDVYKEGDLQTIQQPIDFFGFNYYSTATLKDWKKGDREPIVFEHVSTGRPVTDMNWEVNPNGLFDLMVRLKKDYGDIPLYITENGAAYKDRVNEQGEVEDDERVAYIREHLIACHRAIEQGVNLKGYYVWSLFDNFEWAFGYDKRFGIVYVDYETLERIPKKSALWYKETIINNGLKAEKDKRSHHHHHH

SEQ ID NO: 241 - protein, 461 aa, Artificial Sequence
  Derived by Lab Evolution
MLQFPKDFIWGAATSSYQIEGTATGEDKIYSIWDHFSRIPGKIANGDNGDIAIDHYNRYVEDIALMKALHLKAYRFSTSWARLYCETPGKFNEKGLDFYKRLVNELLENGIEPMLTIYHWDMPQALQEKGGWENRDIVQYFQEYAAFLYENLGDVVKKWITHNEPWVVTYLGYGNGEHAPGIQNFTSFLKAAHHVLLSHGEAVKAFRAIGPKDGEIGITLNLTPGYAVDPKDEKAVDAARKWDGFMNRWFLDPVFKGQYPADMLEVYKDYLPDVYKEGDLQTIQQPIDFFGFNYYSTATLKDWKKGDREPIVFEHVSTGRPVTDMNWEVNPNGLFDLMVRLKKDYGDIPLYITENGAAYKDRVNENGEVEDDERVAYIREHLIACHRAIEQGVNLKGYYVWSLFDNFEWAFGYDKRFGIVYVDYETLERIPKKSALWYKETIINNGLKAEKDKRSHHHHHH

SEQ ID NO: 242 - protein, 461 aa, Artificial Sequence
  Derived by Lab Evolution
MLEFPKDFIWGAATSSYQIEGTATGEDKIYSIWDHFSRIPGKIANGDNGDIAIDHYNRYVEDIALMKALHLKAYRFSTSWARLYCETPGKFNEKGLDFYKRLVNELLENGIEPMLTIYHWDMPQALQEKGGWENRDIVQYFQEYAAFLYENLGDVVKKWITHNEPWVVTYLGYGNGEHAPGIQNFTSFLKAAHHVLLSHGEAVKAFRAIGPKDGEIGITLNLTPGYAVDPKDEKAVDAARKWDGFMNRWFLDPVFKGQYPADMLEVYKDYLPDVYKEGDLQTIQQPIDFFGFNYYSTATLKDWKKGDREPIVFEHVSTGRPVTDMNWEVNPNGLFDLMVRLKKDYGDIPLYITENGAAYKDRVNEQGEVEDDERVAYIREHLIACHRAIEQGVNLKGYYVWSLFDNFEWAFGYDKRFGIVYVDYETLERIPKKSALWYKETIINNGLKAEKDKRSHHHHHH

SEQ ID NO: 243 - protein, 461 aa, Artificial Sequence
  Derived by Lab Evolution
MLMFPKDFIWGAATSSYQIEGTATGEDKIYSIWDHFSRIPGKIANGDNGDIAIDHYNRYVEDIALMKALHLKAYRFSTSWARLYCETPGKFNEKGLDFYKRLVNELLENGIEPMLTIYHWDMPQALQEKGGWENRDIVQYFQEYAAFLYENLGDVVKKWITHNEPWVVTYLGYGNGEHAPGIQNFTSFLKAAHHVLLSHGEAVKAFRAIGPKDGEIGITLNLTPGYAVDPKDEKAVDAARKWDGFMNRWFLDPVFKGQYPADMLEVYKDYLPDVYKEGDLQTIQQPIDFFGFNYYSTATLKDWKKGDREPIVFEHVSTGRPVTDMNWEVNPNGLFDLMVRLKKDYGDIPLYITENGAAYKDRVNEQGEVEDDERVAYIREHLIACHRAIEQGVNLKGYYVWSLFDNFEWAFGYDKRFGIVYVDYETLERIPKKSALWYKETIINNGLKAEKDKRSHHHHHH

SEQ ID NO: 244 - protein, 461 aa, Artificial Sequence
  Derived by Lab Evolution
MLRFPKDFIWGAATSSYQIEGTATGEDKIYSIWDHFSRIPGKIANGDNGDIAIDHYNRYVEDIALMKALHLKAYRFSTSWARLYCETPGKFNEKGLDFYKRLVNELLENGIEPMLTIYHWDMPQALQEKGGWENRDIVQYFQEYAAFLYENLGDVVKKWITHNEPWVVTYLGYGNGEHAPGIQNFTSFLKAAHHVLLSHGEAVKAFRAIGPKDGEIGITLNLTPGYAVDPKDEKAVDAARKWDGFMNRWFLDPVFKGQYPADMLEVYKDYLPDVYKEGDLQTIQQPIDFFGFNYYSTATLKDWKKGDREPIVFEHVSTGRPVTDMNWEVNPNGLFDLMVRLKKDYGDIPLYITENGAAYKDRVNEQGEVEDDERVAYIREHLIACHRAIEQGVNLKGYYVWSLFDNFEWAFGYDKRFGIVYVDYETLERIPKKSALWYKETIINNGLKAEKDKRSHHHHHH

SEQ ID NO: 245 - protein, 461 aa, Artificial Sequence
  Derived by Lab Evolution
MLQFPKDFIWGAATSSYQIEGTATGEDKIYSIWDHFSRIPGKIANGDNGDIAIDHYNRYVEDIALMKALHLKAYRFSTSWARLYCETPGKFNEKGLDFYKRLVNELLENGIEPMLTIYHWDMPQALQEKGGWENRDIVQYFQEYAAFLYENLGDVVKKWITHNEPWVVTYLGYGNGEHAPGIQNFTSFLKAAHHVLLSHGEAVKAFRAIGPKDGEIGITLNLTPGYAVDPKDEKAVDAARKWDGFMNRWFLDPVFKGQYPADMLEVYKDYLPDVYKEGDLQTIQQPIDFFGFNYYSTATLKDWKKGDREPIVFEHVSTGRPVTDMNWEVNPNGLFDLMVRLKKDYGDIPLYITENGAAYKDRVNEQGEVEDDERVAYIREHLIACHRAIEQGVNLKGYYVWSLFDNFEWAFGYDKTFGIVYVDYETLERIPKKSALWYKETIINNGLKAEKDKRSHHHHHH

SEQ ID NO: 246 - protein, 461 aa, Artificial Sequence
  Derived by Lab Evolution
MLQFPKDFIWGAATSSYQIEGTATGEDKIYSIWDHFSRIPGKIANGDNGDIAIDHYNRYVEDIALMKALHLKAYRFSTSWARLYCETPGKFNEKGLDFYKRLVNELLENGIEPMLTIYHWDMPQALQEKGGWENRDIVQYFQEYAAFLYENLGDVVKKWITHNEPWVVTYLGYGNGEHAPGIQNFTSFLKAAHHVLLSHGEAVKAFRAIGPKDGEIGITLNLTPGYAVDPKDEKAVDAARKWDGFMNRWFLDPVFKGQYPADMLEVYKDYLPDVYKEGDLQTIQQPIDFFGFNYYTTATLKDWKKGDREPIVFEHVSTGRPVTDMNWEVNPNGLFDLMVRLKKDYGDIPLYITENGAAYKDRVNEQGEVEDDERVAYIREHLIACHRAIEQGVNLKGYYVWSLFDNFEWAFGYDKRFGIVYVDYETLERIPKKSALWYKETIINNGLKAEKDKRSHHHHHH

SEQ ID NO: 247 - protein, 461 aa, Artificial Sequence
  Derived by Lab Evolution
MLQFPKDFIWGAATSSYQIEGTATGEDKIYSIWDHFSRIPGKIANGDNGDIAIDHYNRYVEDIALMKALHLKAYRFSTSWARLYCETPGKFNEKGLDFYKRLVNELLENGIEPMLTIYHWDMPQALQEKGGWENRDIVQYFQEYAAFLYENLGDVVKKWITHNEPWVVTYLGYGNGEHAPGIQNFTSFLKAAHHVLLSHGEAVKAFRAIGPKDGEIGITLNLTPGYAVDPKDEKAVDAARKWDGFMNRWFLDPVFKGQYPADMLEVYKDYLPDVYKEGDLQTIQQPIDFFGFNYYSTATLKDWKKGDREPIVFEHVKTGRPVTDMNWEVNPNGLFDLMVRLKKDYGDIPLYITENGAAYKDRVNEQGEVEDDERVAYIREHLIACHRAIEQGVNLKGYYVWSLFDNFEWAFGYDKRFGIVYVDYETLERIPKKSALWYKETIINNGLKAEKDKRSHHHHHH

SEQ ID NO: 248 - protein, 461 aa, Artificial Sequence
  Derived by Lab Evolution
MLQFPKDFIWGAATSSYQIEGTATGEDKIYSIWDHFSRIPGKIANGDNGDIAIDHYNRYVEDIALMKALHLKAYRFSTSWARLYCETPGKFNEKGLDFYKRLVNELLENGIEPMLTIYHWDMPQALQEKGGWENRDIVQYFQEYAAFLYENLGDVVKKWITHNEPWVVTYLGYGNGEHAPGIQNFTSFLKAAHHVLLSHGEAVKAFRAIGPKDGEIGITLNLTPGYAVDPKDEKAVDAARKWDGFMNRWFLDPVFKGQYPADMLEVYKDYLPDVYKEGDLQTIQQPIDFFGFNYYSTATLKDWKKGDREPIVFEHVSTGRPVTDMNWEVNPNGLFDLMVRLKKDYGDIPLYITENGAAYKDRVNEQGEVEDDERVAYIREHLIACHRAIEQGVNLKGYYVWTLFDNFEWAFGYDKRFGIVYVDYETLERIPKKSALWYKETIINNGLKAEKDKRSHHHHHH

SEQ ID NO: 249 - protein, 461 aa, Artificial Sequence
  Derived by Lab Evolution
MLQFPKDFIWGAATSSYQIEGTATGEDKIYSIWDHFSRIPGKIANGDNGDIAIDHYNRYVEDIALMKALHLKAYRFSTSWARLYCETPGKFNEKGLDFYKRLVNELLENGIEPMLTIYHWDMPQALQEKGGWENRDIVQYFQEYAAFLYENLGDVVKKWITHNEPWVVTYLGYGNGEHAPGIQNFTSFLKAAHHVLLSHGEAVKAFRAIGPKDGEIGISLNLTPGYAVDPKDEKAVDAARKWDGFMNRWFLDPVFKGQYPADMLEVYKDYLPDVYKEGDLQTIQQPIDFFGFNYYSTATLKDWKKGDREPIVFEHVSTGRPVTDMNWEVNPNGLFDLMVRLKKDYGDIPLYITENGAAYKDRVNEQGEVEDDERVAYIREHLIACHRAIEQGVNLKGYYVWSLFDNFEWAFGYDKRFGIVYVDYETLERIPKKSALWYKETIINNGLKAEKDKRSHHHHHH

SEQ ID NO: 250 - protein, 461 aa, Artificial Sequence
  Derived by Lab Evolution
MLQFPKDFIWGAATSSYQIEGTADGEDKIYSIWDHFSRIPGKIANGDNGDIAIDHYNRYVEDIALMKALHLKAYRFSTSWARLYCETPGKFNEKGLDFYKRLVNELLENGIEPMLTIYHWDMPQALQEKGGWENRDIVQYFQEYAAFLYENLGDVVKKWITHNEPWVVTYLGYGNGEHAPGIQNFTSFLKAAHHVLLSHGEAVKAFRAIGPKDGEIGITLNLTPGYAVDPKDEKAVDAARKWDGFMNRWFLDPVFKGQYPADMLEVYKDYLPDVYKEGDLQTIQQPIDFFGFNYYSTATLKDWKKGDREPIVFEHVSTGRPVTDMNWEVNPNGLFDLMVRLKKDYGDIPLYITENGAAYKDRVNEQGEVEDDERVAYIREHLIACHRAIEQGVNLKGYYVWSLFDNFEWAFGYDKRFGIVYVDYETLERIPKKSALWYKETIINNGLKAEKDKRSHHHHHH

SEQ ID NO: 251 - protein, 461 aa, Artificial Sequence
  Derived by Lab Evolution
MLQFPKDFIWGAATSSYQIEGTAHGEDKIYSIWDHFSRIPGKIANGDNGDIAIDHYNRYVEDIALMKALHLKAYRFSTSWARLYCETPGKFNEKGLDFYKRLVNELLENGIEPMLTIYHWDMPQALQEKGGWENRDIVQYFQEYAAFLYENLGDVVKKWITHNEPWVVTYLGYGNGEHAPGIQNFTSFLKAAHHVLLSHGEAVKAFRAIGPKDGEIGITLNLTPGYAVDPKDEKAVDAARKWDGFMNRWFLDPVFKGQYPADMLEVYKDYLPDVYKEGDLQTIQQPIDFFGFNYYSTATLKDWKKGDREPIVFEHVSTGRPVTDMNWEVNPNGLFDLMVRLKKDYGDIPLYITENGAAYKDRVNEQGEVEDDERVAYIREHLIACHRAIEQGVNLKGYYVWSLFDNFEWAFGYDKRFGIVYVDYETLERIPKKSALWYKETIINNGLKAEKDKRSHHHHHH

SEQ ID NO: 252 - protein, 461 aa, Artificial Sequence
  Derived by Lab Evolution
MLQFPKDFIWGAATSSYQIEGTATGEDKIYSIWDHFSRIPGKIANGDNGDIAIDHYNRYVEDIALMKALHLKAYRFSTSWARLYCETPGKFNEKGLDFYKRLVNELLENGIEPMLTIYHWDMPQALQEKGGWENRDIVQYFQEYAAFLYENLGDVVKKWITHNEPWVVTYLGYGNGEHAPGIQNFTSFLKAAHHVLLSHGEAVKAFRAIGPKDGEIGITLNLTPGYAVDPKDEKAVDAARKWDGFMNRWFLDPVFKGQYPADMLEVYKDYLPDVYKEGDLQTIQQPIDFFGFNYYSSATLKDWKKGDREPIVFEHVSTGRPVTDMNWEVNPNGLFDLMVRLKKDYGDIPLYITENGAAYKDRVNEQGEVEDDERVAYIREHLIACHRAIEQGVNLKGYYVWSLFDNFEWAFGYDKRFGIVYVDYETLERIPKKSALWYKETIINNGLKAEKDKRSHHHHHH

SEQ ID NO: 253 - protein, 461 aa, Artificial Sequence
  Derived by Lab Evolution
MLQFPKDFIWGAATSSYQIEGTATGEDKIYSIWDHFSRIPGKIANGDNGDIAIDHYNRYVEDIALMKALHLKAYRFSTSWARLYCETPGKFNEKGLDFYKRLVNELLENGIEPMLTIYHWDMPQALQEKGGWENRDIVQYFQEYAAFLYENLGDVVKKWITHNEPWVVTYLGYGNGEHAPGIQNFTSFLKAAHHVLLSHGEAVKAFRAIGPKDGEIGITLNLTPGYAVDPKDEKAVDAARKWDGFMNRWFLDPVFKGQYPADMLEVYKDYLPDVYKEGDLQTIQQPIDFFGFNYYSTATLKDWKKGDREPIVFEHVSTGRPVTDMNWEVNPNGLFDLMVRLKKDYGDIPLYITENGAAYKDRVNEQGEVEDDERVAYIREHLIACHRAIEQGVNLKGYYVWSLFDNFEWAFGYDKRFGIVYVDYETLERIPKKSALWYKEVIINNGLKAEKDKRSHHHHHH

SEQ ID NO: 254 - protein, 461 aa, Artificial Sequence
  Derived by Lab Evolution
MLQFPKDFIWGAATSSYQIEGTATGEDKIYSIWDHFSRIPGKIANGDNGDIAIDHYNRYVEDIALMKALHLKAYRFSTSWARLYCETPGKFNEKGLDFYKRLVNELLENGIEPMLTIYHWDMPQALQEKGGWENRDIVQYFQEYAAFLYENLGDVVKKWITHNEPWAVTYLGYGNGEHAPGIQNFTSFLKAAHHVLLSHGEAVKAFRAIGPKDGEIGITLNLTPGYAVDPEDEKAVDAARKWDGFMNRWFLDPVFKGQYPADMLEVYKDYLPDVYKEGDLQTIQQPIDFFGFNYYSTATLKDWKKGDREPIVFEHVSTGRPVTDMNWEVNPNGLFDLMVRLKKDYGDIPLYITENGAAYKDRVNEQGEVEDDERVAYIREHLIACHRAIEQGVNLKGYYVWSLFDNFEWAFGYDKRFGIVYVDYETLERIPKKSALWYKETIINNGLKAEKDKRSHHHHHH

SEQ ID NO: 255 - protein, 461 aa, Artificial Sequence
  Derived by Lab Evolution
MLQFPKDFIWGAATSSYQIEGTATGEDKIYSIWDHFSRIPGKIANGDNGDIAIDHYNRYVEDIALMKALHLKAYRFSTSWARLYCETPGKFNEKGLDFYKRLVNELLENGIEPMLTIYHWDMPQALQEKGGWENRDIVQYFQEYAAFLYENLGDVVKKWITHNEPWVVTYLGYGNGEHAPGIQNFTSFLKAAHHVLLSHGEAPKAFRAIGPKDGEIGITLNLTPGYAVDPKDEKAVDAARKWDGFMNRWFLDPVFKGQYPADMLEVYKDYLPDVYKEGDLQTIQQPIDFFGFNYYSTATLKDWKKGDREPIVFEHVSTGRPVTDMNWEVNPNGLFDLMVRLKKDYGDIPLYITENGAAYKDRVNEQGEVEDDERVAYIREHLIACHRAIEQGVNLKGYYVWSLFDNFEWAFGYDKRFGIVYVDYETLERIPKKSALWYKETIINNGLKAEKDKRSHHHHHH

SEQ ID NO: 256 - protein, 461 aa, Artificial Sequence
  Derived by Lab Evolution
MLQFPKDFIWGAATSSYQIEGTATGEDKIYSIWDHFSRIPGKIANGDNGDIAIDHYNRYVEDIALMKALHLKAYRFSTSWARLYCETPGKFNEKGLDFYKRLVNELLENGIEPMLTIYHWDMPQALQEKGGWENRDIVQYFQEYAAFLYENLGDVVKKWITHNEPWVVTYLGYGNGEHAPGIQNFTSFLKAAHHVLLSHGEAVKAFRAIGPKDGEIGITLNLTPGYAVDPKDEKAVDAARKWDGFMNRWFLDPVFKGQYPADMLEVYKDYLPDVYKEGDLQTIQQPIDFFGFNYYSTATLKDWKKGDREPIVFEHVSTGRPVTDMNWEVNPNGLFDLMVRLKKDYGDIPLYITENGAAYKDRVNEQGEVEDDERVAYIREHLIACHRAIEQGVNLKGYYVWSLFDNFEWAFGYDKRFGILYVDYETLERIPKKSALWYKETIINNGLKAEKDKRSHHHHHH

SEQ ID NO: 257 - protein, 461 aa, Artificial Sequence
  Derived by Lab Evolution
MLQFPKDFIWGAATSSYQIEGTATGEDKIYSIWDHFSRIPGKIANGDNGDIAIDHYNRYREDIALMKALHLKAYRFSTSWARLYCETPGKFNEKGLDFYKRLVNELLENGIEPMLTIYHWDMPQALQEKGGWENRDIVQYFQEYAAFLYENLGDVVKKWITHNEPWVVTYLGYGNGEHAPGIQNFTSFLKAAHHVLLSHGEAVKAFRAIGPKDGEIGITLNLTPGYAVDPKDEKAVDAARKWDGFMNRWFLDPVFKGQYPADMLEVYKDYLPDVYKEGDLQTIQQPIDFFGFNYYSTATLKDWKKGDREPIVFEHVSTGRPVTDMNWEVNPNGLFDLMVRLKKDYGDIPLYITENGAAYKDRVNEQGEVEDDERVAYIREHLIACHRAIEQGVNLKGYYVWSLFDNFEWAFGYDKRFGIVYVDYETLERIPKKSALWYKETIINNGLKAEKDKRSHHHHHH

SEQ ID NO: 258 - protein, 461 aa, Artificial Sequence
  Derived by Lab Evolution
MLQFPKDFIWGAATSSYQIEGTATGEDKIYSIWDHFSRIPGKIANGDNGDIAIDHYNRYVEDIALMKALHLKAYRFSTSWARLYCETPGKFNEKGLDFYKRLVNELLENGIEPMLTIYHWDMPQALQEKGGWENRDIVQYFQEYAAFLYENLGDVVKKWITHNEPWVVTYLGYGNGEHAPGIQNFTSFLKAAHHVLLSHGEAVKAFRAIGPKDGEIGITLNLTPGYAVDPKDEKAVDAARKWDGFMNRWFLDPVFKGQYPADMLEVYKDYLPDVYKEGDLQTIQQPIDFFGFNYYSTATLKDWKKGDREPIVFEHVSTGRPVTDMNWEVNPNGLFDLMVRLKKDYGDIPLYITENGAAYKDRVNEQGEVEDDERVAYIREHLIACHRAIEQGVNLKGYYVFSLFDNFEWAFGYDKRFGIVYVDYETLERIPKKSALWYKETIINNGLKAEKDKRSHHHHHH

SEQ ID NO: 259 - protein, 461 aa, Artificial Sequence
  Derived by Lab Evolution
MLQFPKDFIWGAATSSYQIEGTATGEDKIYSIWDHFSRIPGKIANGDNGDIAIDHYNRYVEDIALMKALHLKAYRFSTSWARLYCETPGKFNEKGLDFYKRLVNELLENGIEPMLTIYHWDMPQALQEKGGWENRDIVQYFQEYAAFLYENLGDVVKKWITHNEPWVVTYLGYGNGEHAPGIQNFTSFLKAAHHVLLSHGEAVKAFRAIGPKDGEIGITLNLTPGYAVDPKDEKAVDAARKWDGFMNRWFLDPVFKGQYPADMLEVYKDYLPDVYKEGDLQTIQQPIDFFGFNYYSTATLKDWKKGDREPIVFEHVSTGRPVTDMNWEVNPNGLFDLMVRLKKDYGDIPLYITENGAAYKDRVNEQGEVEDDERVAYIREHLIACHRAIEQGVNLKGYFVWSLFDNFEWAFGYDKRFGIVYVDYETLERIPKKSALWYKETIINNGLKAEKDKRSHHHHHH

SEQ ID NO: 260 - protein, 461 aa, Artificial Sequence
  Derived by Lab Evolution
MLQFPKDFIWGAATSSYQIEGTATGEDKIYSIWDHFSRIPGKIANGDNGDIAIDHYNRYVEDIALMKALHLKALRFSTSWARLYCETPGKFNEKGLDFYKRLVNELLENGIEPMLTIYHWDMPQALQEKGGWENRDIVQYFQEYAAFLYENLGDVVKKWITHNEPWVVTYLGYGNGEHAPGIQNFTSFLKAAHHVLLSHGEAVKAFRAIGPKDGEIGITLNLTPGYAVDPKDEKAVDAARKWDGFMNRWFLDPVFKGQYPADMLEVYKDYLPDVYKEGDLQTIQQPIDFFGFNYYSTATLKDWKKGDREPIVFEHVSTGRPVTDMNWEVNPNGLFDLMVRLKKDYGDIPLYITENGAAYKDRVNEQGEVEDDERVAYIREHLIACHRAIEQGVNLKGYYVWSLFDNFEWAFGYDKRFGIVYVDYETLERIPKKSALWYKETIINNGLKAEKDKRSHHHHHH

SEQ ID NO: 261 - protein, 461 aa, Artificial Sequence
  Derived by Lab Evolution
MLQFPKHFIWGAATSSYQIEGTATGEDKIYSIWDHFSRIPGKIANGDNGDIAIDHYNRYVEDIALMKALHLKALRFSTSWARLYCETPGKFNEKGLDFYKRLVNELLENGIEPMLTIYHWDMPQALQEKGGWENRDIVQYFQEYAAFLYENLGDVVKKWITHNEPWVVTYLGYGNGEHAPGIQNFTSFLKAAHHVLLSHGEAVKAFRAIGPKDGEVGIALNLTPGYAVDPKDEKAVDAARKWDGFHNRWFLDPVFKGQYPADMLEVYKDYLPDVYKEGDLQTIQQPIDFFGVNYYTTATLKDWKKGDREPIVFEHVSTGRPVTDMNWEVNPNGLFDLMVRLKKDYGDIPLYITENGAAYKDRVNEQGEVEDDERVAYIREHLIACHRAIEQGVNLKGYYVWSLFDNFEWAFGYDKRFGIVYVDYETLERIPKKSALWYKETIINNGLKAEKDKRSHHHHHH

SEQ ID NO: 262 - protein, 461 aa, Artificial Sequence
  Derived by Lab Evolution
MLQFPKHFIWGAATSSYQIEGTATGEDKIYSIWDHFSRIPGKIANGDNGDIAIDHYNRYVEDIALMKALHLKALRFSTSWARLYCETPGKFNEKGLDFYKRLVNELLENGIEPMLTIYHWDMPQALQEKGGWENRDIVQYFQEYAAFLYENLGDVVKKWITHNEPWVVTYLGYGNGEHAPGIQNFTSFLKAAHHVLLSHGEAVKAFRAIGPKDGEVGIALNLTPGYAVDPKDEKAVDAARKWDGFKNRWFLDPVFKGQYPADMLEVYKDYLPDVYKEGDLQTIQQPIDFFGINYYTTATLKDWKKGDREPIVFEHVSTGRPVTDMNWEVNPNGLFDLMVRLKKDYGDIPLYITENGAAYKDRVNEQGEVEDDERVAYIREHLIACHRAIEQGVNLKGYYVWSLFDNFEWAFGYDKRFGIVYVDYETLERIPKKSALWYKETIINNGLKAEKDKRSHHHHHH

SEQ ID NO: 263 - protein, 461 aa, Artificial Sequence
  Derived by Lab Evolution
MLQFPKHFIWGAATSSYQIEGTATGEDKIYSIWDHFSRIPGKIANGDNGDIAIDHYNRYVEDIALMKALHLKALRFSTSWARLYCETPGKFNEKGLDFYKRLVNELLENGIEPMLTIYHWDMPQALQEKGGWENRDIVQYFQEYAAFLYENLGDVVKKWITHNEPWVVTYLGYGNGEHAPGIQNFTSFLKAAHHVLLSHGEAVKAFRAIGPKDGEVGIALNLTPGYAVDPKDEKAVDAARKWDGFMNRWFLDPVFKGQYPADMLEVYKDYLPDVYKEGDLQTIQQPIDFFGINYYTTATLKDWKKGDREPIVFEHVSTGRPVTDMNWEVNPNGLFDLMVRLKKDYGDIPLYITENGAAYKDRVNEQGEVEDDERVAYIREHLIACHRAIEQGVNLKGYYVWSLFDNFEWAFGYDKRFGIVYVDYETLERIPKKSALWYKETIINNGLKAEKDKRSHHHHHH

SEQ ID NO: 264 - protein, 461 aa, Artificial Sequence
  Derived by Lab Evolution
MLQFPKHFIWGAATSSYQIEGTATGEDKIYSIWDHFSRIPGKIANGDNGDIAIDHYNRYVEDIALMKALHLKALRFSTSWARLYCETPGKFNEKGLDFYKRLVNELLENGIEPMLTIYHWDMPQALQEKGGWENRDIVQYFQEYAAFLYENLGDVVKKWITHNEPWVVTYLGYGNGEHAPGIQNFTSFLKAAHHVLLSHGEAVKAFRAIGPKDGEVGIALNLTPGYAVDPKDEKAVDAARKWDGFMNRWFLDPVFKGQYPADMLEVYKDYLPDVYKEGDLQTIQQPIDFFGVNYYTTATLKDWKKGDREPIVFEHVSTGRPVTDMNWEVNPNGLFDLMVRLKKDYGDIPLYITENGAAYKDRVNEQGEVEDDERVAYIREHLIACHRAIEQGVNLKGYYVWSLFDNFEWAFGYDKRFGIVYVDYETLERIPKKSALWYKETIINNGLKAEKDKRSHHHHHH

SEQ ID NO: 265 - protein, 461 aa, Artificial Sequence
  Derived by Lab Evolution
MLQFPKHFIWGAATSSYQIEGTATGEDKIYSIWDHFSRIPGKIANGDNGDIAIDHYNRYVEDIALMKALHLKALRFSTSWARLYCETPGKFNEKGLDFYKRLVNELLENGIEPMLTIYHWDMPQALQEKGGWENRDIVQYFQEYAAFLYENLGDVVKKWITHNEPWVVTYLGYGNGEHAPGIQNFTSFLKAAHHVLLSHGEAVKAFRAIGPKDGEVGISLNLTPGYAVDPKDEKAVDAARKWDGFKNRWFLDPVFKGQYPADMLEVYKDYLPDVYKEGDLQTIQQPIDFFGINYYTTATLKDWKKGDREPIVFEHVSTGRPVTDMNWEVNPNGLFDLMVRLKKDYGDIPLYITENGAAYKDRVNEQGEVEDDERVAYIREHLIACHRAIEQGVNLKGYYYWSLFDNFEWAFGYDKRFGIVYVDYETLERIPKKSALWYKETIINNGLKAEKDKRSHHHHHH

SEQ ID NO: 266 - protein, 461 aa, Artificial Sequence
  Derived by Lab Evolution
MLQFPKHFIWGAATSSYQIEGTATGEDKIYSIWDHFSRIPGKIANGDNGDIAIDHYNRYVEDIALMKALHLKALRFSTSWARLYCETPGKFNEKGLDFYKRLVNELLENGIEPMLTIYHWDMPQALQEKGGWENRDIVQYFQEYAAFLYENLGDVVKKWITHNEPWVVTYLGYGNGEHAPGIQNFTSFLKAAHHVLLSHGEAVKAFRAIGPKDGEVGISLNLTPGYAVDPKDEKAVDAARKWDGFMNRWFLDPVFKGQYPADMLEVYKDYLPDVYKEGDLQTIQQPIDFFGINYYTTATLKDWKKGDREPIVFEHVSTGRPVTDMNWEVNPNGLFDLMVRLKKDYGDIPLYITENGAAYKDRVNEQGEVEDDERVAYIREHLIACHRAIEQGVNLKGYYYWSLFDNFEWAFGYDKRFGIVYVDYETLERIPKKSALWYKETIINNGLKAEKDKRSHHHHHH

SEQ ID NO: 267 - protein, 461 aa, Artificial Sequence
  Derived by Lab Evolution
MLQFPKHFIWGAATSSYQIEGTATGEDKIYSIWDHFSRIPGKIANGDNGDIAIDHYNRYVEDIALMKALHLKALRFSTSWARLYCETPGKFNEKGLDFYKRLVNELLENGIEPMLTIYHWDMPQALQEKGGWENRDIVQYFQEYAAFLYENLGDVVKKWITHNEPWVVTYLGYGNGEHAPGIQNFTSFLKAAHHVLLSHGEAVKAFRAIGPKDGEVGISLNLTPGYAVDPKDEKAVDAARKWDGFMNRWFLDPVFKGQYPADMLEVYKDYLPDVYKEGDLQTIQQPIDFFGVNYYTTATLKDWKKGDREPIVFEHVSTGRPVTDMNWEVNPNGLFDLMVRLKKDYGDIPLYITENGAAYKDRVNEQGEVEDDERVAYIREHLIACHRAIEQGVNLKGYYYWSLFDNFEWAFGYDKRFGIVYVDYETLERIPKKSALWYKETIINNGLKAEKDKRSHHHHHH

SEQ ID NO: 268 - protein, 461 aa, Artificial Sequence
  Derived by Lab Evolution
MLQFPKHFIWGAATSSYQIEGTATGEDKIYSIWDHFSRIPGKIANGDNGDIAIDHYNRYVEDIALMKALHLKALRFSTSWARLYCETPGKFNEKGLDFYKRLVNELLENGIEPMLTIYHWDMPQALQEKGGWENRDIVQYFQEYAAFLYENLGDVVKKWITHNEPWVVTYLGYGNGEHAPGIQNFTSFLKAAHHVLLSHGEAVKAFRAIGPKDGEVGITLNLTPGYAVDPKDEKAVDAARKWDGFKNRWFLDPVFKGQYPADMLEVYKDYLPDVYKEGDLQTIQQPIDFFGVNYYTTATLKDWKKGDREPIVFEHVSTGRPVTDMNWEVNPNGLFDLMVRLKKDYGDIPLYITENGAAYKDRVNEQGEVEDDERVAYIREHLIACHRAIEQGVNLKGYYYWSLFDNFEWAFGYDKRFGIVYVDYETLERIPKKSALWYKETIINNGLKAEKDKRSHHHHHH

SEQ ID NO: 269 - protein, 461 aa, Artificial Sequence
  Derived by Lab Evolution
MLQFPKHFIWGAATSSYQIEGTATGEDKIYSIWDHFSRIPGKIANGDNGDIAIDHYNRYVEDIALMKALHLKALRFSTSWARLYCETPGKFNEKGLDFYKRLVNELLENGIEPMLTIYHWDMPQALQEKGGWENRDIVQYFQEYAAFLYENLGDVVKKWITHNEPWVVTYLGYGNGEHAPGIQNFTSFLKAAHHVLLSHGEAVKAFRAIGPKDGEIGIALNLTPGYAVDPKDEKAVDAARKWDGFKNRWFLDPVFKGQYPADMLEVYKDYLPDVYKEGDLQTIQQPIDFFGINYYTTATLKDWKKGDREPIVFEHVSTGRPVTDMNWEVNPNGLFDLMVRLKKDYGDIPLYITENGAAYKDRVNEQGEVEDDERVAYIREHLIACHRAIEQGVNLKGYYVWSLFDNFEWAFGYDKRFGIVYVDYETLERIPKKSALWYKETIINNGLKAEKDKRSHHHHHH

SEQ ID NO: 270 - protein, 461 aa, Artificial Sequence
  Derived by Lab Evolution
MLQFPKHFIWGAATSSYQIEGTATGEDKIYSIWDHFSRIPGKIANGDNGDIAIDHYNRYVEDIALMKALHLKALRFSTSWARLYCETPGKFNEKGLDFYKRLVNELLENGIEPMLTIYHWDMPQALQEKGGWENRDIVQYFQEYAAFLYENLGDVVKKWITHNEPWVVTYLGYGNGEHAPGIQNFTSFLKAAHHVLLSHGEAVKAFRAIGPKDGEIGISLNLTPGYAVDPKDEKAVDAARKWDGFKNRWFLDPVFKGQYPADMLEVYKDYLPDVYKEGDLQTIQQPIDFFGINYYTTATLKDWKKGDREPIVFEHVSTGRPVTDMNWEVNPNGLFDLMVRLKKDYGDIPLYITENGAAYKDRVNEQGEVEDDERVAYIREHLIACHRAIEQGVNLKGYYVWSLFDNFEWAFGYDKRFGIVYVDYETLERIPKKSALWYKETIINNGLKAEKDKRSHHHHHH

SEQ ID NO: 271 - protein, 461 aa, Artificial Sequence
  Derived by Lab Evolution
MLQFPKHFIWGAATSSYQIEGTATGEDKIYSIWDHFSRIPGKIANGDNGDIAIDHYNRYVEDIALMKALHLKALRFSTSWARLYCETPGKFNEKGLDFYKRLVNELLENGIEPMLTIYHWDMPQALQEKGGWENRDIVQYFQEYAAFLYENLGDVVKKWITHNEPWVVTYLGYGNGEHAPGIQNFTSFLKAAHHVLLSHGEAVKAFRAIGPKDGEIGISLNLTPGYAVDPKDEKAVDAARKWDGFKNRWFLDPVFKGQYPADMLEVYKDYLPDVYKEGDLQTIQQPIDFFGVNYYTTATLKDWKKGDREPIVFEHVSTGRPVTDMNWEVNPNGLFDLMVRLKKDYGDIPLYITENGAAYKDRVNEQGEVEDDERVAYIREHLIACHRAIEQGVNLKGYYVWSLFDNFEWAFGYDKRFGIVYVDYETLERIPKKSALWYKETIINNGLKAEKDKRSHHHHHH

SEQ ID NO: 272 - protein, 461 aa, Artificial Sequence
  Derived by Lab Evolution
MLQFPKHFIWGAATSSYQIEGTATGEDKIYSIWDHFSRIPGKIANGDNGDIAIDHYNRYVEDIALMKALHLKALRFSTSWARLYCETPGKFNEKGLDFYKRLVNELLENGIEPMLTIYHWDMPQALQEKGGWENRDIVQYFQEYAAFLYENLGDVVKKWITHNEPWVVTYLGYGNGEHAPGIQNFTSFLKAAHHVLLSHGEAVKAFRAIGPKDGEIGITLNLTPGYAVDPKDEKAVDAARKWDGFHNRWFLDPVFKGQYPADMLEVYKDYLPDVYKEGDLQTIQQPIDFFGVNYYTTATLKDWKKGDREPIVFEHVSTGRPVTDMNWEVNPNGLFDLMVRLKKDYGDIPLYITENGAAYKDRVNEQGEVEDDERVAYIREHLIACHRAIEQGVNLKGYFYWSLFDNFEWAFGYDKRFGIVYVDYETLERIPKKSALWYKETIINNGLKAEKDKRSHHHHHH

SEQ ID NO: 273 - protein, 461 aa, Artificial Sequence
  Derived by Lab Evolution
MLQFPKHFIWGAATSSYQIEGTATGEDKIYSIWDHFSRIPGKIANGDNGDIAIDHYNRYVEDIALMKALHLKAYRFSTSWARLYCETPGKFNEKGLDFYKRLVNELLENGIEPMLTIYHWDMPQALQEKGGWENRDIVQYFQEYAAFLYENLGDVVKKWITHNEPWVVTYLGYGNGEHAPGIQNFTSFLKAAHHVLLSHGEAVKAFRAIGPKDGEVGIALNLTPGYAVDPKDEKAVDAARKWDGFHNRWFLDPVFKGQYPADMLEVYKDYLPDVYKEGDLQTIQQPIDFFGVNYYTTATLKDWKKGDREPIVFEHVSTGRPVTDMNWEVNPNGLFDLMVRLKKDYGDIPLYITENGAAYKDRVNEQGEVEDDERVAYIREHLIACHRAIEQGVNLKGYYVWSLFDNFEWAFGYDKRFGIVYVDYETLERIPKKSALWYKETIINNGLKAEKDKRSHHHHHH

SEQ ID NO: 274 - protein, 461 aa, Artificial Sequence
  Derived by Lab Evolution
MLQFPKHFIWGAATSSYQIEGTATGEDKIYSIWDHFSRIPGKIANGDNGDIAIDHYNRYVEDIALMKALHLKAYRFSTSWARLYCETPGKFNEKGLDFYKRLVNELLENGIEPMLTIYHWDMPQALQEKGGWENRDIVQYFQEYAAFLYENLGDVVKKWITHNEPWVVTYLGYGNGEHAPGIQNFTSFLKAAHHVLLSHGEAVKAFRAIGPKDGEVGIALNLTPGYAVDPKDEKAVDAARKWDGFHNRWFLDPVFKGQYPADMLEVYKDYLPDVYKEGDLQTIQQPIDFFGFNYYTTATLKDWKKGDREPIVFEHVSTGRPVTDMNWEVNPNGLFDLMVRLKKDYGDIPLYITENGAAYKDRVNEQGEVEDDERVAYIREHLIACHRAIEQGVNLKGYFYWSLFDNFEWAFGYDKRFGIVYVDYETLERIPKKSALWYKETIINNGLKAEKDKRSHHHHHH

SEQ ID NO: 275 - protein, 461 aa, Artificial Sequence
  Derived by Lab Evolution
MLQFPKHFIWGAATSSYQIEGTATGEDKIYSIWDHFSRIPGKIANGDNGDIAIDHYNRYVEDIALMKALHLKAYRFSTSWARLYCETPGKFNEKGLDFYKRLVNELLENGIEPMLTIYHWDMPQALQEKGGWENRDIVQYFQEYAAFLYENLGDVVKKWITHNEPWVVTYLGYGNGEHAPGIQNFTSFLKAAHHVLLSHGEAVKAFRAIGPKDGEVGIALNLTPGYAVDPKDEKAVDAARKWDGFKNRWFLDPVFKGQYPADMLEVYKDYLPDVYKEGDLQTIQQPIDFFGINYYTTATLKDWKKGDREPIVFEHVSTGRPVTDMNWEVNPNGLFDLMVRLKKDYGDIPLYITENGAAYKDRVNEQGEVEDDERVAYIREHLIACHRAIEQGVNLKGYFYWSLFDNFEWAFGYDKRFGIVYVDYETLERIPKKSALWYKETIINNGLKAEKDKRSHHHHHH

SEQ ID NO: 276 - protein, 461 aa, Artificial Sequence
  Derived by Lab Evolution
MLQFPKHFIWGAATSSYQIEGTATGEDKIYSIWDHFSRIPGKIANGDNGDIAIDHYNRYVEDIALMKALHLKAYRFSTSWARLYCETPGKFNEKGLDFYKRLVNELLENGIEPMLTIYHWDMPQALQEKGGWENRDIVQYFQEYAAFLYENLGDVVKKWITHNEPWVVTYLGYGNGEHAPGIQNFTSFLKAAHHVLLSHGEAVKAFRAIGPKDGEVGIALNLTPGYAVDPKDEKAVDAARKWDGFKNRWFLDPVFKGQYPADMLEVYKDYLPDVYKEGDLQTIQQPIDFFGINYYTTATLKDWKKGDREPIVFEHVSTGRPVTDMNWEVNPNGLFDLMVRLKKDYGDIPLYITENGAAYKDRVNEQGEVEDDERVAYIREHLIACHRAIEQGVNLKGYYVWSLFDNFEWAFGYDKRFGIVYVDYETLERIPKKSALWYKETIINNGLKAEKDKRSHHHHHH

SEQ ID NO: 277 - protein, 461 aa, Artificial Sequence
  Derived by Lab Evolution
MLQFPKHFIWGAATSSYQIEGTATGEDKIYSIWDHFSRIPGKIANGDNGDIAIDHYNRYVEDIALMKALHLKAYRFSTSWARLYCETPGKFNEKGLDFYKRLVNELLENGIEPMLTIYHWDMPQALQEKGGWENRDIVQYFQEYAAFLYENLGDVVKKWITHNEPWVVTYLGYGNGEHAPGIQNFTSFLKAAHHVLLSHGEAVKAFRAIGPKDGEVGIALNLTPGYAVDPKDEKAVDAARKWDGFKNRWFLDPVFKGQYPADMLEVYKDYLPDVYKEGDLQTIQQPIDFFGFNYYTTATLKDWKKGDREPIVFEHVSTGRPVTDMNWEVNPNGLFDLMVRLKKDYGDIPLYITENGAAYKDRVNEQGEVEDDERVAYIREHLIACHRAIEQGVNLKGYYVFSLFDNFEWAFGYDKRFGIVYVDYETLERIPKKSALWYKETIINNGLKAEKDKRSHHHHHH

SEQ ID NO: 278 - protein, 461 aa, Artificial Sequence
  Derived by Lab Evolution
MLQFPKHFIWGAATSSYQIEGTATGEDKIYSIWDHFSRIPGKIANGDNGDIAIDHYNRYVEDIALMKALHLKAYRFSTSWARLYCETPGKFNEKGLDFYKRLVNELLENGIEPMLTIYHWDMPQALQEKGGWENRDIVQYFQEYAAFLYENLGDVVKKWITHNEPWVVTYLGYGNGEHAPGIQNFTSFLKAAHHVLLSHGEAVKAFRAIGPKDGEVGIALNLTPGYAVDPKDEKAVDAARKWDGFMNRWFLDPVFKGQYPADMLEVYKDYLPDVYKEGDLQTIQQPIDFFGVNYYTTATLKDWKKGDREPIVFEHVSTGRPVTDMNWEVNPNGLFDLMVRLKKDYGDIPLYITENGAAYKDRVNEQGEVEDDERVAYIREHLIACHRAIEQGVNLKGYFVFSLFDNFEWAFGYDKRFGIVYVDYETLERIPKKSALWYKETIINNGLKAEKDKRSHHHHHH

SEQ ID NO: 279 - protein, 461 aa, Artificial Sequence
  Derived by Lab Evolution
MLQFPKHFIWGAATSSYQIEGTATGEDKIYSIWDHFSRIPGKIANGDNGDIAIDHYNRYVEDIALMKALHLKAYRFSTSWARLYCETPGKFNEKGLDFYKRLVNELLENGIEPMLTIYHWDMPQALQEKGGWENRDIVQYFQEYAAFLYENLGDVVKKWITHNEPWVVTYLGYGNGEHAPGIQNFTSFLKAAHHVLLSHGEAVKAFRAIGPKDGEVGIALNLTPGYAVDPKDEKAVDAARKWDGFMNRWFLDPVFKGQYPADMLEVYKDYLPDVYKEGDLQTIQQPIDFFGVNYYTTATLKDWKKGDREPIVFEHVSTGRPVTDMNWEVNPNGLFDLMVRLKKDYGDIPLYITENGAAYKDRVNEQGEVEDDERVAYIREHLIACHRAIEQGVNLKGYYVFSLFDNFEWAFGYDKRFGIVYVDYETLERIPKKSALWYKETIINNGLKAEKDKRSHHHHHH

SEQ ID NO: 280 - protein, 461 aa, Artificial Sequence
  Derived by Lab Evolution
MLQFPKHFIWGAATSSYQIEGTATGEDKIYSIWDHFSRIPGKIANGDNGDIAIDHYNRYVEDIALMKALHLKAYRFSTSWARLYCETPGKFNEKGLDFYKRLVNELLENGIEPMLTIYHWDMPQALQEKGGWENRDIVQYFQEYAAFLYENLGDVVKKWITHNEPWVVTYLGYGNGEHAPGIQNFTSFLKAAHHVLLSHGEAVKAFRAIGPKDGEVGISLNLTPGYAVDPKDEKAVDAARKWDGFHNRWFLDPVFKGQYPADMLEVYKDYLPDVYKEGDLQTIQQPIDFFGINYYTTATLKDWKKGDREPIVFEHVSTGRPVTDMNWEVNPNGLFDLMVRLKKDYGDIPLYITENGAAYKDRVNEQGEVEDDERVAYIREHLIACHRAIEQGVNLKGYYVFSLFDNFEWAFGYDKRFGIVYVDYETLERIPKKSALWYKETIINNGLKAEKDKRSHHHHHH

SEQ ID NO: 281 - protein, 461 aa, Artificial Sequence
  Derived by Lab Evolution
MLQFPKHFIWGAATSSYQIEGTATGEDKIYSIWDHFSRIPGKIANGDNGDIAIDHYNRYVEDIALMKALHLKAYRFSTSWARLYCETPGKFNEKGLDFYKRLVNELLENGIEPMLTIYHWDMPQALQEKGGWENRDIVQYFQEYAAFLYENLGDVVKKWITHNEPWVVTYLGYGNGEHAPGIQNFTSFLKAAHHVLLSHGEAVKAFRAIGPKDGEVGISLNLTPGYAVDPKDEKAVDAARKWDGFHNRWFLDPVFKGQYPADMLEVYKDYLPDVYKEGDLQTIQQPIDFFGINYYTTATLKDWKKGDREPIVFEHVSTGRPVTDMNWEVNPNGLFDLMVRLKKDYGDIPLYITENGAAYKDRVNEQGEVEDDERVAYIREHLIACHRAIEQGVNLKGYYYWSLFDNFEWAFGYDKRFGIVYVDYETLERIPKKSALWYKETIINNGLKAEKDKRSHHHHHH

SEQ ID NO: 282 - protein, 461 aa, Artificial Sequence
  Derived by Lab Evolution
MLQFPKHFIWGAATSSYQIEGTATGEDKIYSIWDHFSRIPGKIANGDNGDIAIDHYNRYVEDIALMKALHLKAYRFSTSWARLYCETPGKFNEKGLDFYKRLVNELLENGIEPMLTIYHWDMPQALQEKGGWENRDIVQYFQEYAAFLYENLGDVVKKWITHNEPWVVTYLGYGNGEHAPGIQNFTSFLKAAHHVLLSHGEAVKAFRAIGPKDGEVGISLNLTPGYAVDPKDEKAVDAARKWDGFHNRWFLDPVFKGQYPADMLEVYKDYLPDVYKEGDLQTIQQPIDFFGVNYYTTATLKDWKKGDREPIVFEHVSTGRPVTDMNWEVNPNGLFDLMVRLKKDYGDIPLYITENGAAYKDRVNEQGEVEDDERVAYIREHLIACHRAIEQGVNLKGYFVFSLFDNFEWAFGYDKRFGIVYVDYETLERIPKKSALWYKETIINNGLKAEKDKRSHHHHHH

SEQ ID NO: 283 - protein, 461 aa, Artificial Sequence
  Derived by Lab Evolution
MLQFPKHFIWGAATSSYQIEGTATGEDKIYSIWDHFSRIPGKIANGDNGDIAIDHYNRYVEDIALMKALHLKAYRFSTSWARLYCETPGKFNEKGLDFYKRLVNELLENGIEPMLTIYHWDMPQALQEKGGWENRDIVQYFQEYAAFLYENLGDVVKKWITHNEPWVVTYLGYGNGEHAPGIQNFTSFLKAAHHVLLSHGEAVKAFRAIGPKDGEVGISLNLTPGYAVDPKDEKAVDAARKWDGFKNRWFLDPVFKGQYPADMLEVYKDYLPDVYKEGDLQTIQQPIDFFGINYYTTATLKDWKKGDREPIVFEHVSTGRPVTDMNWEVNPNGLFDLMVRLKKDYGDIPLYITENGAAYKDRVNEQGEVEDDERVAYIREHLIACHRAIEQGVNLKGYYVFSLFDNFEWAFGYDKRFGIVYVDYETLERIPKKSALWYKETIINNGLKAEKDKRSHHHHHH

SEQ ID NO: 284 - protein, 461 aa, Artificial Sequence
  Derived by Lab Evolution
MLQFPKHFIWGAATSSYQIEGTATGEDKIYSIWDHFSRIPGKIANGDNGDIAIDHYNRYVEDIALMKALHLKAYRFSTSWARLYCETPGKFNEKGLDFYKRLVNELLENGIEPMLTIYHWDMPQALQEKGGWENRDIVQYFQEYAAFLYENLGDVVKKWITHNEPWVVTYLGYGNGEHAPGIQNFTSFLKAAHHVLLSHGEAVKAFRAIGPKDGEVGISLNLTPGYAVDPKDEKAVDAARKWDGFKNRWFLDPVFKGQYPADMLEVYKDYLPDVYKEGDLQTIQQPIDFFGVNYYTTATLKDWKKGDREPIVFEHVSTGRPVTDMNWEVNPNGLFDLMVRLKKDYGDIPLYITENGAAYKDRVNEQGEVEDDERVAYIREHLIACHRAIEQGVNLKGYYYWSLFDNFEWAFGYDKRFGIVYVDYETLERIPKKSALWYKETIINNGLKAEKDKRSHHHHHH

SEQ ID NO: 285 - protein, 461 aa, Artificial Sequence
  Derived by Lab Evolution
MLQFPKHFIWGAATSSYQIEGTATGEDKIYSIWDHFSRIPGKIANGDNGDIAIDHYNRYVEDIALMKALHLKAYRFSTSWARLYCETPGKFNEKGLDFYKRLVNELLENGIEPMLTIYHWDMPQALQEKGGWENRDIVQYFQEYAAFLYENLGDVVKKWITHNEPWVVTYLGYGNGEHAPGIQNFTSFLKAAHHVLLSHGEAVKAFRAIGPKDGEVGISLNLTPGYAVDPKDEKAVDAARKWDGFMNRWFLDPVFKGQYPADMLEVYKDYLPDVYKEGDLQTIQQPIDFFGINYYTTATLKDWKKGDREPIVFEHVSTGRPVTDMNWEVNPNGLFDLMVRLKKDYGDIPLYITENGAAYKDRVNEQGEVEDDERVAYIREHLIACHRAIEQGVNLKGYFVFSLFDNFEWAFGYDKRFGIVYVDYETLERIPKKSALWYKETIINNGLKAEKDKRSHHHHHH

SEQ ID NO: 286 - protein, 461 aa, Artificial Sequence
  Derived by Lab Evolution
MLQFPKHFIWGAATSSYQIEGTATGEDKIYSIWDHFSRIPGKIANGDNGDIAIDHYNRYVEDIALMKALHLKAYRFSTSWARLYCETPGKFNEKGLDFYKRLVNELLENGIEPMLTIYHWDMPQALQEKGGWENRDIVQYFQEYAAFLYENLGDVVKKWITHNEPWVVTYLGYGNGEHAPGIQNFTSFLKAAHHVLLSHGEAVKAFRAIGPKDGEVGISLNLTPGYAVDPKDEKAVDAARKWDGFMNRWFLDPVFKGQYPADMLEVYKDYLPDVYKEGDLQTIQQPIDFFGINYYTTATLKDWKKGDREPIVFEHVSTGRPVTDMNWEVNPNGLFDLMVRLKKDYGDIPLYITENGAAYKDRVNEQGEVEDDERVAYIREHLIACHRAIEQGVNLKGYFYWSLFDNFEWAFGYDKRFGIVYVDYETLERIPKKSALWYKETIINNGLKAEKDKRSHHHHHH

SEQ ID NO: 287 - protein, 461 aa, Artificial Sequence
  Derived by Lab Evolution
MLQFPKHFIWGAATSSYQIEGTATGEDKIYSIWDHFSRIPGKIANGDNGDIAIDHYNRYVEDIALMKALHLKAYRFSTSWARLYCETPGKFNEKGLDFYKRLVNELLENGIEPMLTIYHWDMPQALQEKGGWENRDIVQYFQEYAAFLYENLGDVVKKWITHNEPWVVTYLGYGNGEHAPGIQNFTSFLKAAHHVLLSHGEAVKAFRAIGPKDGEVGISLNLTPGYAVDPKDEKAVDAARKWDGFMNRWFLDPVFKGQYPADMLEVYKDYLPDVYKEGDLQTIQQPIDFFGINYYTTATLKDWKKGDREPIVFEHVSTGRPVTDMNWEVNPNGLFDLMVRLKKDYGDIPLYITENGAAYKDRVNEQGEVEDDERVAYIREHLIACHRAIEQGVNLKGYYVFSLFDNFEWAFGYDKRFGIVYVDYETLERIPKKSALWYKETIINNGLKAEKDKRSHHHHHH

SEQ ID NO: 288 - protein, 461 aa, Artificial Sequence
  Derived by Lab Evolution
MLQFPKHFIWGAATSSYQIEGTATGEDKIYSIWDHFSRIPGKIANGDNGDIAIDHYNRYVEDIALMKALHLKAYRFSTSWARLYCETPGKFNEKGLDFYKRLVNELLENGIEPMLTIYHWDMPQALQEKGGWENRDIVQYFQEYAAFLYENLGDVVKKWITHNEPWVVTYLGYGNGEHAPGIQNFTSFLKAAHHVLLSHGEAVKAFRAIGPKDGEVGISLNLTPGYAVDPKDEKAVDAARKWDGFMNRWFLDPVFKGQYPADMLEVYKDYLPDVYKEGDLQTIQQPIDFFGVNYYTTATLKDWKKGDREPIVFEHVSTGRPVTDMNWEVNPNGLFDLMVRLKKDYGDIPLYITENGAAYKDRVNEQGEVEDDERVAYIREHLIACHRAIEQGVNLKGYFVFSLFDNFEWAFGYDKRFGIVYVDYETLERIPKKSALWYKETIINNGLKAEKDKRSHHHHHH

SEQ ID NO: 289 - protein, 461 aa, Artificial Sequence
  Derived by Lab Evolution
MLQFPKHFIWGAATSSYQIEGTATGEDKIYSIWDHFSRIPGKIANGDNGDIAIDHYNRYVEDIALMKALHLKAYRFSTSWARLYCETPGKFNEKGLDFYKRLVNELLENGIEPMLTIYHWDMPQALQEKGGWENRDIVQYFQEYAAFLYENLGDVVKKWITHNEPWVVTYLGYGNGEHAPGIQNFTSFLKAAHHVLLSHGEAVKAFRAIGPKDGEVGISLNLTPGYAVDPKDEKAVDAARKWDGFMNRWFLDPVFKGQYPADMLEVYKDYLPDVYKEGDLQTIQQPIDFFGVNYYTTATLKDWKKGDREPIVFEHVSTGRPVTDMNWEVNPNGLFDLMVRLKKDYGDIPLYITENGAAYKDRVNEQGEVEDDERVAYIREHLIACHRAIEQGVNLKGYYVFSLFDNFEWAFGYDKRFGIVYVDYETLERIPKKSALWYKETIINNGLKAEKDKRSHHHHHH

SEQ ID NO: 290 - protein, 461 aa, Artificial Sequence
  Derived by Lab Evolution
MLQFPKHFIWGAATSSYQIEGTATGEDKIYSIWDHFSRIPGKIANGDNGDIAIDHYNRYVEDIALMKALHLKAYRFSTSWARLYCETPGKFNEKGLDFYKRLVNELLENGIEPMLTIYHWDMPQALQEKGGWENRDIVQYFQEYAAFLYENLGDVVKKWITHNEPWVVTYLGYGNGEHAPGIQNFTSFLKAAHHVLLSHGEAVKAFRAIGPKDGEVGITLNLTPGYAVDPKDEKAVDAARKWDGFKNRWFLDPVFKGQYPADMLEVYKDYLPDVYKEGDLQTIQQPIDFFGINYYTTATLKDWKKGDREPIVFEHVSTGRPVTDMNWEVNPNGLFDLMVRLKKDYGDIPLYITENGAAYKDRVNEQGEVEDDERVAYIREHLIACHRAIEQGVNLKGYFVFSLFDNFEWAFGYDKRFGIVYVDYETLERIPKKSALWYKETIINNGLKAEKDKRSHHHHHH

SEQ ID NO: 291 - protein, 461 aa, Artificial Sequence
  Derived by Lab Evolution
MLQFPKHFIWGAATSSYQIEGTATGEDKIYSIWDHFSRIPGKIANGDNGDIAIDHYNRYVEDIALMKALHLKAYRFSTSWARLYCETPGKFNEKGLDFYKRLVNELLENGIEPMLTIYHWDMPQALQEKGGWENRDIVQYFQEYAAFLYENLGDVVKKWITHNEPWVVTYLGYGNGEHAPGIQNFTSFLKAAHHVLLSHGEAVKAFRAIGPKDGEVGITLNLTPGYAVDPKDEKAVDAARKWDGFKNRWFLDPVFKGQYPADMLEVYKDYLPDVYKEGDLQTIQQPIDFFGVNYYTTATLKDWKKGDREPIVFEHVSTGRPVTDMNWEVNPNGLFDLMVRLKKDYGDIPLYITENGAAYKDRVNEQGEVEDDERVAYIREHLIACHRAIEQGVNLKGYYVFSLFDNFEWAFGYDKRFGIVYVDYETLERIPKKSALWYKETIINNGLKAEKDKRSHHHHHH

SEQ ID NO: 292 - protein, 461 aa, Artificial Sequence
  Derived by Lab Evolution
MLQFPKHFIWGAATSSYQIEGTATGEDKIYSIWDHFSRIPGKIANGDNGDIAIDHYNRYVEDIALMKALHLKAYRFSTSWARLYCETPGKFNEKGLDFYKRLVNELLENGIEPMLTIYHWDMPQALQEKGGWENRDIVQYFQEYAAFLYENLGDVVKKWITHNEPWVVTYLGYGNGEHAPGIQNFTSFLKAAHHVLLSHGEAVKAFRAIGPKDGEIGIALNLTPGYAVDPKDEKAVDAARKWDGFHNRWFLDPVFKGQYPADMLEVYKDYLPDVYKEGDLQTIQQPIDFFGVNYYTTATLKDWKKGDREPIVFEHVSTGRPVTDMNWEVNPNGLFDLMVRLKKDYGDIPLYITENGAAYKDRVNEQGEVEDDERVAYIREHLIACHRAIEQGVNLKGYFYWSLFDNFEWAFGYDKRFGIVYVDYETLERIPKKSALWYKETIINNGLKAEKDKRSHHHHHH

SEQ ID NO: 293 - protein, 461 aa, Artificial Sequence
  Derived by Lab Evolution
MLQFPKHFIWGAATSSYQIEGTATGEDKIYSIWDHFSRIPGKIANGDNGDIAIDHYNRYVEDIALMKALHLKAYRFSTSWARLYCETPGKFNEKGLDFYKRLVNELLENGIEPMLTIYHWDMPQALQEKGGWENRDIVQYFQEYAAFLYENLGDVVKKWITHNEPWVVTYLGYGNGEHAPGIQNFTSFLKAAHHVLLSHGEAVKAFRAIGPKDGEIGIALNLTPGYAVDPKDEKAVDAARKWDGFHNRWFLDPVFKGQYPADMLEVYKDYLPDVYKEGDLQTIQQPIDFFGVNYYTTATLKDWKKGDREPIVFEHVSTGRPVTDMNWEVNPNGLFDLMVRLKKDYGDIPLYITENGAAYKDRVNEQGEVEDDERVAYIREHLIACHRAIEQGVNLKGYYYWSLFDNFEWAFGYDKRFGIVYVDYETLERIPKKSALWYKETIINNGLKAEKDKRSHHHHHH

SEQ ID NO: 294 - protein, 461 aa, Artificial Sequence
  Derived by Lab Evolution
MLQFPKHFIWGAATSSYQIEGTATGEDKIYSIWDHFSRIPGKIANGDNGDIAIDHYNRYVEDIALMKALHLKAYRFSTSWARLYCETPGKFNEKGLDFYKRLVNELLENGIEPMLTIYHWDMPQALQEKGGWENRDIVQYFQEYAAFLYENLGDVVKKWITHNEPWVVTYLGYGNGEHAPGIQNFTSFLKAAHHVLLSHGEAVKAFRAIGPKDGEIGIALNLTPGYAVDPKDEKAVDAARKWDGFKNRWFLDPVFKGQYPADMLEVYKDYLPDVYKEGDLQTIQQPIDFFGVNYYTTATLKDWKKGDREPIVFEHVSTGRPVTDMNWEVNPNGLFDLMVRLKKDYGDIPLYITENGAAYKDRVNEQGEVEDDERVAYIREHLIACHRAIEQGVNLKGYFYWSLFDNFEWAFGYDKRFGIVYVDYETLERIPKKSALWYKETIINNGLKAEKDKRSHHHHHH

SEQ ID NO: 295 - protein, 461 aa, Artificial Sequence
  Derived by Lab Evolution
MLQFPKHFIWGAATSSYQIEGTATGEDKIYSIWDHFSRIPGKIANGDNGDIAIDHYNRYVEDIALMKALHLKAYRFSTSWARLYCETPGKFNEKGLDFYKRLVNELLENGIEPMLTIYHWDMPQALQEKGGWENRDIVQYFQEYAAFLYENLGDVVKKWITHNEPWVVTYLGYGNGEHAPGIQNFTSFLKAAHHVLLSHGEAVKAFRAIGPKDGEIGIALNLTPGYAVDPKDEKAVDAARKWDGFMNRWFLDPVFKGQYPADMLEVYKDYLPDVYKEGDLQTIQQPIDFFGINYYTTATLKDWKKGDREPIVFEHVSTGRPVTDMNWEVNPNGLFDLMVRLKKDYGDIPLYITENGAAYKDRVNEQGEVEDDERVAYIREHLIACHRAIEQGVNLKGYFVFSLFDNFEWAFGYDKRFGIVYVDYETLERIPKKSALWYKETIINNGLKAEKDKRSHHHHHH

SEQ ID NO: 296 - protein, 461 aa, Artificial Sequence
  Derived by Lab Evolution
MLQFPKHFIWGAATSSYQIEGTATGEDKIYSIWDHFSRIPGKIANGDNGDIAIDHYNRYVEDIALMKALHLKAYRFSTSWARLYCETPGKFNEKGLDFYKRLVNELLENGIEPMLTIYHWDMPQALQEKGGWENRDIVQYFQEYAAFLYENLGDVVKKWITHNEPWVVTYLGYGNGEHAPGIQNFTSFLKAAHHVLLSHGEAVKAFRAIGPKDGEIGIALNLTPGYAVDPKDEKAVDAARKWDGFMNRWFLDPVFKGQYPADMLEVYKDYLPDVYKEGDLQTIQQPIDFFGINYYTTATLKDWKKGDREPIVFEHVSTGRPVTDMNWEVNPNGLFDLMVRLKKDYGDIPLYITENGAAYKDRVNEQGEVEDDERVAYIREHLIACHRAIEQGVNLKGYYVFSLFDNFEWAFGYDKRFGIVYVDYETLERIPKKSALWYKETIINNGLKAEKDKRSHHHHHH

SEQ ID NO: 297 - protein, 461 aa, Artificial Sequence
  Derived by Lab Evolution
MLQFPKHFIWGAATSSYQIEGTATGEDKIYSIWDHFSRIPGKIANGDNGDIAIDHYNRYVEDIALMKALHLKAYRFSTSWARLYCETPGKFNEKGLDFYKRLVNELLENGIEPMLTIYHWDMPQALQEKGGWENRDIVQYFQEYAAFLYENLGDVVKKWITHNEPWVVTYLGYGNGEHAPGIQNFTSFLKAAHHVLLSHGEAVKAFRAIGPKDGEIGIALNLTPGYAVDPKDEKAVDAARKWDGFMNRWFLDPVFKGQYPADMLEVYKDYLPDVYKEGDLQTIQQPIDFFGVNYYTTATLKDWKKGDREPIVFEHVSTGRPVTDMNWEVNPNGLFDLMVRLKKDYGDIPLYITENGAAYKDRVNEQGEVEDDERVAYIREHLIACHRAIEQGVNLKGYFVFSLFDNFEWAFGYDKRFGIVYVDYETLERIPKKSALWYKETIINNGLKAEKDKRSHHHHHH

SEQ ID NO: 298 - protein, 461 aa, Artificial Sequence
  Derived by Lab Evolution
MLQFPKHFIWGAATSSYQIEGTATGEDKIYSIWDHFSRIPGKIANGDNGDIAIDHYNRYVEDIALMKALHLKAYRFSTSWARLYCETPGKFNEKGLDFYKRLVNELLENGIEPMLTIYHWDMPQALQEKGGWENRDIVQYFQEYAAFLYENLGDVVKKWITHNEPWVVTYLGYGNGEHAPGIQNFTSFLKAAHHVLLSHGEAVKAFRAIGPKDGEIGISLNLTPGYAVDPKDEKAVDAARKWDGFHNRWFLDPVFKGQYPADMLEVYKDYLPDVYKEGDLQTIQQPIDFFGINYYTTATLKDWKKGDREPIVFEHVSTGRPVTDMNWEVNPNGLFDLMVRLKKDYGDIPLYITENGAAYKDRVNEQGEVEDDERVAYIREHLIACHRAIEQGVNLKGYYYWSLFDNFEWAFGYDKRFGIVYVDYETLERIPKKSALWYKETIINNGLKAEKDKRSHHHHHH

SEQ ID NO: 299 - protein, 461 aa, Artificial Sequence
  Derived by Lab Evolution
MLQFPKHFIWGAATSSYQIEGTATGEDKIYSIWDHFSRIPGKIANGDNGDIAIDHYNRYVEDIALMKALHLKAYRFSTSWARLYCETPGKFNEKGLDFYKRLVNELLENGIEPMLTIYHWDMPQALQEKGGWENRDIVQYFQEYAAFLYENLGDVVKKWITHNEPWVVTYLGYGNGEHAPGIQNFTSFLKAAHHVLLSHGEAVKAFRAIGPKDGEIGISLNLTPGYAVDPKDEKAVDAARKWDGFKNRWFLDPVFKGQYPADMLEVYKDYLPDVYKEGDLQTIQQPIDFFGINYYTTATLKDWKKGDREPIVFEHVSTGRPVTDMNWEVNPNGLFDLMVRLKKDYGDIPLYITENGAAYKDRVNEQGEVEDDERVAYIREHLIACHRAIEQGVNLKGYYVFSLFDNFEWAFGYDKRFGIVYVDYETLERIPKKSALWYKETIINNGLKAEKDKRSHHHHHH

SEQ ID NO: 300 - protein, 461 aa, Artificial Sequence
  Derived by Lab Evolution
MLQFPKHFIWGAATSSYQIEGTATGEDKIYSIWDHFSRIPGKIANGDNGDIAIDHYNRYVEDIALMKALHLKAYRFSTSWARLYCETPGKFNEKGLDFYKRLVNELLENGIEPMLTIYHWDMPQALQEKGGWENRDIVQYFQEYAAFLYENLGDVVKKWITHNEPWVVTYLGYGNGEHAPGIQNFTSFLKAAHHVLLSHGEAVKAFRAIGPKDGEIGISLNLTPGYAVDPKDEKAVDAARKWDGFKNRWFLDPVFKGQYPADMLEVYKDYLPDVYKEGDLQTIQQPIDFFGINYYTTATLKDWKKGDREPIVFEHVSTGRPVTDMNWEVNPNGLFDLMVRLKKDYGDIPLYITENGAAYKDRVNEQGEVEDDERVAYIREHLIACHRAIEQGVNLKGYYYWSLFDNFEWAFGYDKRFGIVYVDYETLERIPKKSALWYKETIINNGLKAEKDKRSHHHHHH

SEQ ID NO: 301 - protein, 461 aa, Artificial Sequence
  Derived by Lab Evolution
MLQFPKHFIWGAATSSYQIEGTATGEDKIYSIWDHFSRIPGKIANGDNGDIAIDHYNRYVEDIALMKALHLKAYRFSTSWARLYCETPGKFNEKGLDFYKRLVNELLENGIEPMLTIYHWDMPQALQEKGGWENRDIVQYFQEYAAFLYENLGDVVKKWITHNEPWVVTYLGYGNGEHAPGIQNFTSFLKAAHHVLLSHGEAVKAFRAIGPKDGEIGISLNLTPGYAVDPKDEKAVDAARKWDGFKNRWFLDPVFKGQYPADMLEVYKDYLPDVYKEGDLQTIQQPIDFFGVNYYTTATLKDWKKGDREPIVFEHVSTGRPVTDMNWEVNPNGLFDLMVRLKKDYGDIPLYITENGAAYKDRVNEQGEVEDDERVAYIREHLIACHRAIEQGVNLKGYFYWSLFDNFEWAFGYDKRFGIVYVDYETLERIPKKSALWYKETIINNGLKAEKDKRSHHHHHH

SEQ ID NO: 302 - protein, 461 aa, Artificial Sequence
  Derived by Lab Evolution
MLQFPKHFIWGAATSSYQIEGTATGEDKIYSIWDHFSRIPGKIANGDNGDIAIDHYNRYVEDIALMKALHLKAYRFSTSWARLYCETPGKFNEKGLDFYKRLVNELLENGIEPMLTIYHWDMPQALQEKGGWENRDIVQYFQEYAAFLYENLGDVVKKWITHNEPWVVTYLGYGNGEHAPGIQNFTSFLKAAHHVLLSHGEAVKAFRAIGPKDGEIGISLNLTPGYAVDPKDEKAVDAARKWDGFKNRWFLDPVFKGQYPADMLEVYKDYLPDVYKEGDLQTIQQPIDFFGFNYYTTATLKDWKKGDREPIVFEHVSTGRPVTDMNWEVNPNGLFDLMVRLKKDYGDIPLYITENGAAYKDRVNEQGEVEDDERVAYIREHLIACHRAIEQGVNLKGYYVFSLFDNFEWAFGYDKRFGIVYVDYETLERIPKKSALWYKETIINNGLKAEKDKRSHHHHHH

SEQ ID NO: 303 - protein, 461 aa, Artificial Sequence
  Derived by Lab Evolution
MLQFPKHFIWGAATSSYQIEGTATGEDKIYSIWDHFSRIPGKIANGDNGDIAIDHYNRYVEDIALMKALHLKAYRFSTSWARLYCETPGKFNEKGLDFYKRLVNELLENGIEPMLTIYHWDMPQALQEKGGWENRDIVQYFQEYAAFLYENLGDVVKKWITHNEPWVVTYLGYGNGEHAPGIQNFTSFLKAAHHVLLSHGEAVKAFRAIGPKDGEIGISLNLTPGYAVDPKDEKAVDAARKWDGFMNRWFLDPVFKGQYPADMLEVYKDYLPDVYKEGDLQTIQQPIDFFGINYYTTATLKDWKKGDREPIVFEHVSTGRPVTDMNWEVNPNGLFDLMVRLKKDYGDIPLYITENGAAYKDRVNEQGEVEDDERVAYIREHLIACHRAIEQGVNLKGYFVFSLFDNFEWAFGYDKRFGIVYVDYETLERIPKKSALWYKETIINNGLKAEKDKRSHHHHHH

SEQ ID NO: 304 - protein, 461 aa, Artificial Sequence
  Derived by Lab Evolution
MLQFPKHFIWGAATSSYQIEGTATGEDKIYSIWDHFSRIPGKIANGDNGDIAIDHYNRYVEDIALMKALHLKAYRFSTSWARLYCETPGKFNEKGLDFYKRLVNELLENGIEPMLTIYHWDMPQALQEKGGWENRDIVQYFQEYAAFLYENLGDVVKKWITHNEPWVVTYLGYGNGEHAPGIQNFTSFLKAAHHVLLSHGEAVKAFRAIGPKDGEIGISLNLTPGYAVDPKDEKAVDAARKWDGFMNRWFLDPVFKGQYPADMLEVYKDYLPDVYKEGDLQTIQQPIDFFGVNYYTTATLKDWKKGDREPIVFEHVSTGRPVTDMNWEVNPNGLFDLMVRLKKDYGDIPLYITENGAAYKDRVNEQGEVEDDERVAYIREHLIACHRAIEQGVNLKGYFVFSLFDNFEWAFGYDKRFGIVYVDYETLERIPKKSALWYKETIINNGLKAEKDKRSHHHHHH

SEQ ID NO: 305 - protein, 461 aa, Artificial Sequence
  Derived by Lab Evolution
MLQFPKHFIWGAATSSYQIEGTATGEDKIYSIWDHFSRIPGKIANGDNGDIAIDHYNRYVEDIALMKALHLKAYRFSTSWARLYCETPGKFNEKGLDFYKRLVNELLENGIEPMLTIYHWDMPQALQEKGGWENRDIVQYFQEYAAFLYENLGDVVKKWITHNEPWVVTYLGYGNGEHAPGIQNFTSFLKAAHHVLLSHGEAVKAFRAIGPKDGEIGISLNLTPGYAVDPKDEKAVDAARKWDGFMNRWFLDPVFKGQYPADMLEVYKDYLPDVYKEGDLQTIQQPIDFFGVNYYTTATLKDWKKGDREPIVFEHVSTGRPVTDMNWEVNPNGLFDLMVRLKKDYGDIPLYITENGAAYKDRVNEQGEVEDDERVAYIREHLIACHRAIEQGVNLKGYYVFSLFDNFEWAFGYDKRFGIVYVDYETLERIPKKSALWYKETIINNGLKAEKDKRSHHHHHH

SEQ ID NO: 306 - protein, 461 aa, Artificial Sequence
  Derived by Lab Evolution
MLQFPKHFIWGAATSSYQIEGTATGEDKIYSIWDHFSRIPGKIANGDNGDIAIDHYNRYVEDIALMKALHLKAYRFSTSWARLYCETPGKFNEKGLDFYKRLVNELLENGIEPMLTIYHWDMPQALQEKGGWENRDIVQYFQEYAAFLYENLGDVVKKWITHNEPWVVTYLGYGNGEHAPGIQNFTSFLKAAHHVLLSHGEAVKAFRAIGPKDGEIGITLNLTPGYAVDPKDEKAVDAARKWDGFHNRWFLDPVFKGQYPADMLEVYKDYLPDVYKEGDLQTIQQPIDFFGVNYYTTATLKDWKKGDREPIVFEHVSTGRPVTDMNWEVNPNGLFDLMVRLKKDYGDIPLYITENGAAYKDRVNEQGEVEDDERVAYIREHLIACHRAIEQGVNLKGYFVFSLFDNFEWAFGYDKRFGIVYVDYETLERIPKKSALWYKETIINNGLKAEKDKRSHHHHHH

SEQ ID NO: 307 - protein, 461 aa, Artificial Sequence
  Derived by Lab Evolution
MLQFPKHFIWGAATSSYQIEGTATGEDKIYSIWDHFSRIPGKIANGDNGDIAIDHYNRYVEDIALMKALHLKAYRFSTSWARLYCETPGKFNEKGLDFYKRLVNELLENGIEPMLTIYHWDMPQALQEKGGWENRDIVQYFQEYAAFLYENLGDVVKKWITHNEPWVVTYLGYGNGEHAPGIQNFTSFLKAAHHVLLSHGEAVKAFRAIGPKDGEIGITLNLTPGYAVDPKDEKAVDAARKWDGFKNRWFLDPVFKGQYPADMLEVYKDYLPDVYKEGDLQTIQQPIDFFGINYYTTATLKDWKKGDREPIVFEHVSTGRPVTDMNWEVNPNGLFDLMVRLKKDYGDIPLYITENGAAYKDRVNEQGEVEDDERVAYIREHLIACHRAIEQGVNLKGYFVFSLFDNFEWAFGYDKRFGIVYVDYETLERIPKKSALWYKETIINNGLKAEKDKRSHHHHHH

SEQ ID NO: 308 - protein, 461 aa, Artificial Sequence
  Derived by Lab Evolution
MLQFPKDFIWGAATSSYQIEGTATGEDKIYSIWDHFSRIPGKIANGDNGDIAIDHYNRYVEDIALMKALHLKALRFSTSWARLYCETPGKFNEKGLDFYKRLVNELLENGIEPMLTIYHWDMPQALQEKGGWENRDIVQYFQEYAAFLYENLGDVVKKWITHNEPWVVTYLGYGNGEHAPGIQNFTSFLKAAHHVLLSHGEAVKAFRAIGPKDGEVGIALNLTPGYAVDPKDEKAVDAARKWDGFMNRWFLDPVFKGQYPADMLEVYKDYLPDVYKEGDLQTIQQPIDFFGINYYTTATLKDWKKGDREPIVFEHVSTGRPVTDMNWEVNPNGLFDLMVRLKKDYGDIPLYITENGAAYKDRVNEQGEVEDDERVAYIREHLIACHRAIEQGVNLKGYYVWSLFDNFEWAFGYDKRFGIVYVDYETLERIPKKSALWYKETIINNGLKAEKDKRSHHHHHH

SEQ ID NO: 309 - protein, 461 aa, Artificial Sequence
  Derived by Lab Evolution
MLQFPKDFIWGAATSSYQIEGTATGEDKIYSIWDHFSRIPGKIANGDNGDIAIDHYNRYVEDIALMKALHLKALRFSTSWARLYCETPGKFNEKGLDFYKRLVNELLENGIEPMLTIYHWDMPQALQEKGGWENRDIVQYFQEYAAFLYENLGDVVKKWITHNEPWVVTYLGYGNGEHAPGIQNFTSFLKAAHHVLLSHGEAVKAFRAIGPKDGEVGIALNLTPGYAVDPKDEKAVDAARKWDGFMNRWFLDPVFKGQYPADMLEVYKDYLPDVYKEGDLQTIQQPIDFFGVNYYTTATLKDWKKGDREPIVFEHVSTGRPVTDMNWEVNPNGLFDLMVRLKKDYGDIPLYITENGAAYKDRVNEQGEVEDDERVAYIREHLIACHRAIEQGVNLKGYYYWSLFDNFEWAFGYDKRFGIVYVDYETLERIPKKSALWYKETIINNGLKAEKDKRSHHHHHH

SEQ ID NO: 310 - protein, 461 aa, Artificial Sequence
  Derived by Lab Evolution
MLQFPKDFIWGAATSSYQIEGTATGEDKIYSIWDHFSRIPGKIANGDNGDIAIDHYNRYVEDIALMKALHLKALRFSTSWARLYCETPGKFNEKGLDFYKRLVNELLENGIEPMLTIYHWDMPQALQEKGGWENRDIVQYFQEYAAFLYENLGDVVKKWITHNEPWVVTYLGYGNGEHAPGIQNFTSFLKAAHHVLLSHGEAVKAFRAIGPKDGEVGIALNLTPGYAVDPKDEKAVDAARKWDGFMNRWFLDPVFKGQYPADMLEVYKDYLPDVYKEGDLQTIQQPIDFFGVNYYTTATLKDWKKGDREPIVFEHVSTGRPVTDMNWEVNPNGLFDLMVRLKKDYGDIPLYITENGAAYKDRVNEQGEVEDDERVAYIREHLIACHRAIEQGVNLKGYYVWSLFDNFEWAFGYDKRFGIVYVDYETLERIPKKSALWYKETIINNGLKAEKDKRSHHHHHH

SEQ ID NO: 311 - protein, 461 aa, Artificial Sequence
  Derived by Lab Evolution
MLQFPKDFIWGAATSSYQIEGTATGEDKIYSIWDHFSRIPGKIANGDNGDIAIDHYNRYVEDIALMKALHLKALRFSTSWARLYCETPGKFNEKGLDFYKRLVNELLENGIEPMLTIYHWDMPQALQEKGGWENRDIVQYFQEYAAFLYENLGDVVKKWITHNEPWVVTYLGYGNGEHAPGIQNFTSFLKAAHHVLLSHGEAVKAFRAIGPKDGEVGISLNLTPGYAVDPKDEKAVDAARKWDGFKNRWFLDPVFKGQYPADMLEVYKDYLPDVYKEGDLQTIQQPIDFFGINYYTTATLKDWKKGDREPIVFEHVSTGRPVTDMNWEVNPNGLFDLMVRLKKDYGDIPLYITENGAAYKDRVNEQGEVEDDERVAYIREHLIACHRAIEQGVNLKGYYVWSLFDNFEWAFGYDKRFGIVYVDYETLERIPKKSALWYKETIINNGLKAEKDKRSHHHHHH

SEQ ID NO: 312 - protein, 461 aa, Artificial Sequence
  Derived by Lab Evolution
MLQFPKDFIWGAATSSYQIEGTATGEDKIYSIWDHFSRIPGKIANGDNGDIAIDHYNRYVEDIALMKALHLKALRFSTSWARLYCETPGKFNEKGLDFYKRLVNELLENGIEPMLTIYHWDMPQALQEKGGWENRDIVQYFQEYAAFLYENLGDVVKKWITHNEPWVVTYLGYGNGEHAPGIQNFTSFLKAAHHVLLSHGEAVKAFRAIGPKDGEVGISLNLTPGYAVDPKDEKAVDAARKWDGFKNRWFLDPVFKGQYPADMLEVYKDYLPDVYKEGDLQTIQQPIDFFGVNYYTTATLKDWKKGDREPIVFEHVSTGRPVTDMNWEVNPNGLFDLMVRLKKDYGDIPLYITENGAAYKDRVNEQGEVEDDERVAYIREHLIACHRAIEQGVNLKGYYVWSLFDNFEWAFGYDKRFGIVYVDYETLERIPKKSALWYKETIINNGLKAEKDKRSHHHHHH

SEQ ID NO: 313 - protein, 461 aa, Artificial Sequence
  Derived by Lab Evolution
MLQFPKDFIWGAATSSYQIEGTATGEDKIYSIWDHFSRIPGKIANGDNGDIAIDHYNRYVEDIALMKALHLKALRFSTSWARLYCETPGKFNEKGLDFYKRLVNELLENGIEPMLTIYHWDMPQALQEKGGWENRDIVQYFQEYAAFLYENLGDVVKKWITHNEPWVVTYLGYGNGEHAPGIQNFTSFLKAAHHVLLSHGEAVKAFRAIGPKDGEVGISLNLTPGYAVDPKDEKAVDAARKWDGFMNRWFLDPVFKGQYPADMLEVYKDYLPDVYKEGDLQTIQQPIDFFGINYYTTATLKDWKKGDREPIVFEHVSTGRPVTDMNWEVNPNGLFDLMVRLKKDYGDIPLYITENGAAYKDRVNEQGEVEDDERVAYIREHLIACHRAIEQGVNLKGYFYWSLFDNFEWAFGYDKRFGIVYVDYETLERIPKKSALWYKETIINNGLKAEKDKRSHHHHHH

SEQ ID NO: 314 - protein, 461 aa, Artificial Sequence
  Derived by Lab Evolution
MLQFPKDFIWGAATSSYQIEGTATGEDKIYSIWDHFSRIPGKIANGDNGDIAIDHYNRYVEDIALMKALHLKALRFSTSWARLYCETPGKFNEKGLDFYKRLVNELLENGIEPMLTIYHWDMPQALQEKGGWENRDIVQYFQEYAAFLYENLGDVVKKWITHNEPWVVTYLGYGNGEHAPGIQNFTSFLKAAHHVLLSHGEAVKAFRAIGPKDGEVGITLNLTPGYAVDPKDEKAVDAARKWDGFKNRWFLDPVFKGQYPADMLEVYKDYLPDVYKEGDLQTIQQPIDFFGVNYYTTATLKDWKKGDREPIVFEHVSTGRPVTDMNWEVNPNGLFDLMVRLKKDYGDIPLYITENGAAYKDRVNEQGEVEDDERVAYIREHLIACHRAIEQGVNLKGYYYWSLFDNFEWAFGYDKRFGIVYVDYETLERIPKKSALWYKETIINNGLKAEKDKRSHHHHHH

SEQ ID NO: 315 - protein, 461 aa, Artificial Sequence
  Derived by Lab Evolution
MLQFPKDFIWGAATSSYQIEGTATGEDKIYSIWDHFSRIPGKIANGDNGDIAIDHYNRYVEDIALMKALHLKALRFSTSWARLYCETPGKFNEKGLDFYKRLVNELLENGIEPMLTIYHWDMPQALQEKGGWENRDIVQYFQEYAAFLYENLGDVVKKWITHNEPWVVTYLGYGNGEHAPGIQNFTSFLKAAHHVLLSHGEAVKAFRAIGPKDGEIGIALNLTPGYAVDPKDEKAVDAARKWDGFMNRWFLDPVFKGQYPADMLEVYKDYLPDVYKEGDLQTIQQPIDFFGINYYTTATLKDWKKGDREPIVFEHVSTGRPVTDMNWEVNPNGLFDLMVRLKKDYGDIPLYITENGAAYKDRVNEQGEVEDDERVAYIREHLIACHRAIEQGVNLKGYYVWSLFDNFEWAFGYDKRFGIVYVDYETLERIPKKSALWYKETIINNGLKAEKDKRSHHHHHH

SEQ ID NO: 316 - protein, 461 aa, Artificial Sequence
  Derived by Lab Evolution
MLQFPKDFIWGAATSSYQIEGTATGEDKIYSIWDHFSRIPGKIANGDNGDIAIDHYNRYVEDIALMKALHLKALRFSTSWARLYCETPGKFNEKGLDFYKRLVNELLENGIEPMLTIYHWDMPQALQEKGGWENRDIVQYFQEYAAFLYENLGDVVKKWITHNEPWVVTYLGYGNGEHAPGIQNFTSFLKAAHHVLLSHGEAVKAFRAIGPKDGEIGIALNLTPGYAVDPKDEKAVDAARKWDGFMNRWFLDPVFKGQYPADMLEVYKDYLPDVYKEGDLQTIQQPIDFFGVNYYTTATLKDWKKGDREPIVFEHVSTGRPVTDMNWEVNPNGLFDLMVRLKKDYGDIPLYITENGAAYKDRVNEQGEVEDDERVAYIREHLIACHRAIEQGVNLKGYYVWSLFDNFEWAFGYDKRFGIVYVDYETLERIPKKSALWYKETIINNGLKAEKDKRSHHHHHH

SEQ ID NO: 317 - protein, 461 aa, Artificial Sequence
  Derived by Lab Evolution
MLQFPKDFIWGAATSSYQIEGTATGEDKIYSIWDHFSRIPGKIANGDNGDIAIDHYNRYVEDIALMKALHLKALRFSTSWARLYCETPGKFNEKGLDFYKRLVNELLENGIEPMLTIYHWDMPQALQEKGGWENRDIVQYFQEYAAFLYENLGDVVKKWITHNEPWVVTYLGYGNGEHAPGIQNFTSFLKAAHHVLLSHGEAVKAFRAIGPKDGEIGISLNLTPGYAVDPKDEKAVDAARKWDGFKNRWFLDPVFKGQYPADMLEVYKDYLPDVYKEGDLQTIQQPIDFFGINYYTTATLKDWKKGDREPIVFEHVSTGRPVTDMNWEVNPNGLFDLMVRLKKDYGDIPLYITENGAAYKDRVNEQGEVEDDERVAYIREHLIACHRAIEQGVNLKGYYVWSLFDNFEWAFGYDKRFGIVYVDYETLERIPKKSALWYKETIINNGLKAEKDKRSHHHHHH

SEQ ID NO: 318 - protein, 461 aa, Artificial Sequence
  Derived by Lab Evolution
MLQFPKDFIWGAATSSYQIEGTATGEDKIYSIWDHFSRIPGKIANGDNGDIAIDHYNRYVEDIALMKALHLKALRFSTSWARLYCETPGKFNEKGLDFYKRLVNELLENGIEPMLTIYHWDMPQALQEKGGWENRDIVQYFQEYAAFLYENLGDVVKKWITHNEPWVVTYLGYGNGEHAPGIQNFTSFLKAAHHVLLSHGEAVKAFRAIGPKDGEIGISLNLTPGYAVDPKDEKAVDAARKWDGFMNRWFLDPVFKGQYPADMLEVYKDYLPDVYKEGDLQTIQQPIDFFGVNYYTTATLKDWKKGDREPIVFEHVSTGRPVTDMNWEVNPNGLFDLMVRLKKDYGDIPLYITENGAAYKDRVNEQGEVEDDERVAYIREHLIACHRAIEQGVNLKGYYYWSLFDNFEWAFGYDKRFGIVYVDYETLERIPKKSALWYKETIINNGLKAEKDKRSHHHHHH

SEQ ID NO: 319 - protein, 461 aa, Artificial Sequence
  Derived by Lab Evolution
MLQFPKDFIWGAATSSYQIEGTATGEDKIYSIWDHFSRIPGKIANGDNGDIAIDHYNRYVEDIALMKALHLKAYRFSTSWARLYCETPGKFNEKGLDFYKRLVNELLENGIEPMLTIYHWDMPQALQEKGGWENRDIVQYFQEYAAFLYENLGDVVKKWITHNEPWVVTYLGYGNGEHAPGIQNFTSFLKAAHHVLLSHGEAVKAFRAIGPKDGEVGIALNLTPGYAVDPKDEKAVDAARKWDGFHNRWFLDPVFKGQYPADMLEVYKDYLPDVYKEGDLQTIQQPIDFFGINYYTTATLKDWKKGDREPIVFEHVSTGRPVTDMNWEVNPNGLFDLMVRLKKDYGDIPLYITENGAAYKDRVNEQGEVEDDERVAYIREHLIACHRAIEQGVNLKGYFVWSLFDNFEWAFGYDKRFGIVYVDYETLERIPKKSALWYKETIINNGLKAEKDKRSHHHHHH

SEQ ID NO: 320 - protein, 461 aa, Artificial Sequence
  Derived by Lab Evolution
MLQFPKDFIWGAATSSYQIEGTATGEDKIYSIWDHFSRIPGKIANGDNGDIAIDHYNRYVEDIALMKALHLKAYRFSTSWARLYCETPGKFNEKGLDFYKRLVNELLENGIEPMLTIYHWDMPQALQEKGGWENRDIVQYFQEYAAFLYENLGDVVKKWITHNEPWVVTYLGYGNGEHAPGIQNFTSFLKAAHHVLLSHGEAVKAFRAIGPKDGEVGIALNLTPGYAVDPKDEKAVDAARKWDGFHNRWFLDPVFKGQYPADMLEVYKDYLPDVYKEGDLQTIQQPIDFFGVNYYTTATLKDWKKGDREPIVFEHVSTGRPVTDMNWEVNPNGLFDLMVRLKKDYGDIPLYITENGAAYKDRVNEQGEVEDDERVAYIREHLIACHRAIEQGVNLKGYYVFSLFDNFEWAFGYDKRFGIVYVDYETLERIPKKSALWYKETIINNGLKAEKDKRSHHHHHH

SEQ ID NO: 321 - protein, 461 aa, Artificial Sequence
  Derived by Lab Evolution
MLQFPKDFIWGAATSSYQIEGTATGEDKIYSIWDHFSRIPGKIANGDNGDIAIDHYNRYVEDIALMKALHLKAYRFSTSWARLYCETPGKFNEKGLDFYKRLVNELLENGIEPMLTIYHWDMPQALQEKGGWENRDIVQYFQEYAAFLYENLGDVVKKWITHNEPWVVTYLGYGNGEHAPGIQNFTSFLKAAHHVLLSHGEAVKAFRAIGPKDGEVGIALNLTPGYAVDPKDEKAVDAARKWDGFKNRWFLDPVFKGQYPADMLEVYKDYLPDVYKEGDLQTIQQPIDFFGINYYTTATLKDWKKGDREPIVFEHVSTGRPVTDMNWEVNPNGLFDLMVRLKKDYGDIPLYITENGAAYKDRVNEQGEVEDDERVAYIREHLIACHRAIEQGVNLKGYYVWSLFDNFEWAFGYDKRFGIVYVDYETLERIPKKSALWYKETIINNGLKAEKDKRSHHHHHH

SEQ ID NO: 322 - protein, 461 aa, Artificial Sequence
  Derived by Lab Evolution
MLQFPKDFIWGAATSSYQIEGTATGEDKIYSIWDHFSRIPGKIANGDNGDIAIDHYNRYVEDIALMKALHLKAYRFSTSWARLYCETPGKFNEKGLDFYKRLVNELLENGIEPMLTIYHWDMPQALQEKGGWENRDIVQYFQEYAAFLYENLGDVVKKWITHNEPWVVTYLGYGNGEHAPGIQNFTSFLKAAHHVLLSHGEAVKAFRAIGPKDGEVGIALNLTPGYAVDPKDEKAVDAARKWDGFKNRWFLDPVFKGQYPADMLEVYKDYLPDVYKEGDLQTIQQPIDFFGVNYYTTATLKDWKKGDREPIVFEHVSTGRPVTDMNWEVNPNGLFDLMVRLKKDYGDIPLYITENGAAYKDRVNEQGEVEDDERVAYIREHLIACHRAIEQGVNLKGYFVFSLFDNFEWAFGYDKRFGIVYVDYETLERIPKKSALWYKETIINNGLKAEKDKRSHHHHHH

SEQ ID NO: 323 - protein, 461 aa, Artificial Sequence
  Derived by Lab Evolution
MLQFPKDFIWGAATSSYQIEGTATGEDKIYSIWDHFSRIPGKIANGDNGDIAIDHYNRYVEDIALMKALHLKAYRFSTSWARLYCETPGKFNEKGLDFYKRLVNELLENGIEPMLTIYHWDMPQALQEKGGWENRDIVQYFQEYAAFLYENLGDVVKKWITHNEPWVVTYLGYGNGEHAPGIQNFTSFLKAAHHVLLSHGEAVKAFRAIGPKDGEVGIALNLTPGYAVDPKDEKAVDAARKWDGFMNRWFLDPVFKGQYPADMLEVYKDYLPDVYKEGDLQTIQQPIDFFGINYYTTATLKDWKKGDREPIVFEHVSTGRPVTDMNWEVNPNGLFDLMVRLKKDYGDIPLYITENGAAYKDRVNEQGEVEDDERVAYIREHLIACHRAIEQGVNLKGYFVFSLFDNFEWAFGYDKRFGIVYVDYETLERIPKKSALWYKETIINNGLKAEKDKRSHHHHHH

SEQ ID NO: 324 - protein, 461 aa, Artificial Sequence
  Derived by Lab Evolution
MLQFPKDFIWGAATSSYQIEGTATGEDKIYSIWDHFSRIPGKIANGDNGDIAIDHYNRYVEDIALMKALHLKAYRFSTSWARLYCETPGKFNEKGLDFYKRLVNELLENGIEPMLTIYHWDMPQALQEKGGWENRDIVQYFQEYAAFLYENLGDVVKKWITHNEPWVVTYLGYGNGEHAPGIQNFTSFLKAAHHVLLSHGEAVKAFRAIGPKDGEVGIALNLTPGYAVDPKDEKAVDAARKWDGFMNRWFLDPVFKGQYPADMLEVYKDYLPDVYKEGDLQTIQQPIDFFGINYYTTATLKDWKKGDREPIVFEHVSTGRPVTDMNWEVNPNGLFDLMVRLKKDYGDIPLYITENGAAYKDRVNEQGEVEDDERVAYIREHLIACHRAIEQGVNLKGYFYWSLFDNFEWAFGYDKRFGIVYVDYETLERIPKKSALWYKETIINNGLKAEKDKRSHHHHHH

SEQ ID NO: 325 - protein, 461 aa, Artificial Sequence
  Derived by Lab Evolution
MLQFPKDFIWGAATSSYQIEGTATGEDKIYSIWDHFSRIPGKIANGDNGDIAIDHYNRYVEDIALMKALHLKAYRFSTSWARLYCETPGKFNEKGLDFYKRLVNELLENGIEPMLTIYHWDMPQALQEKGGWENRDIVQYFQEYAAFLYENLGDVVKKWITHNEPWVVTYLGYGNGEHAPGIQNFTSFLKAAHHVLLSHGEAVKAFRAIGPKDGEVGIALNLTPGYAVDPKDEKAVDAARKWDGFMNRWFLDPVFKGQYPADMLEVYKDYLPDVYKEGDLQTIQQPIDFFGVNYYTTATLKDWKKGDREPIVFEHVSTGRPVTDMNWEVNPNGLFDLMVRLKKDYGDIPLYITENGAAYKDRVNEQGEVEDDERVAYIREHLIACHRAIEQGVNLKGYFYWSLFDNFEWAFGYDKRFGIVYVDYETLERIPKKSALWYKETIINNGLKAEKDKRSHHHHHH

SEQ ID NO: 326 - protein, 461 aa, Artificial Sequence
  Derived by Lab Evolution
MLQFPKDFIWGAATSSYQIEGTATGEDKIYSIWDHFSRIPGKIANGDNGDIAIDHYNRYVEDIALMKALHLKAYRFSTSWARLYCETPGKFNEKGLDFYKRLVNELLENGIEPMLTIYHWDMPQALQEKGGWENRDIVQYFQEYAAFLYENLGDVVKKWITHNEPWVVTYLGYGNGEHAPGIQNFTSFLKAAHHVLLSHGEAVKAFRAIGPKDGEVGIALNLTPGYAVDPKDEKAVDAARKWDGFMNRWFLDPVFKGQYPADMLEVYKDYLPDVYKEGDLQTIQQPIDFFGVNYYTTATLKDWKKGDREPIVFEHVSTGRPVTDMNWEVNPNGLFDLMVRLKKDYGDIPLYITENGAAYKDRVNEQGEVEDDERVAYIREHLIACHRAIEQGVNLKGYYVFSLFDNFEWAFGYDKRFGIVYVDYETLERIPKKSALWYKETIINNGLKAEKDKRSHHHHHH

SEQ ID NO: 327 - protein, 461 aa, Artificial Sequence
  Derived by Lab Evolution
MLQFPKDFIWGAATSSYQIEGTATGEDKIYSIWDHFSRIPGKIANGDNGDIAIDHYNRYVEDIALMKALHLKAYRFSTSWARLYCETPGKFNEKGLDFYKRLVNELLENGIEPMLTIYHWDMPQALQEKGGWENRDIVQYFQEYAAFLYENLGDVVKKWITHNEPWVVTYLGYGNGEHAPGIQNFTSFLKAAHHVLLSHGEAVKAFRAIGPKDGEVGISLNLTPGYAVDPKDEKAVDAARKWDGFHNRWFLDPVFKGQYPADMLEVYKDYLPDVYKEGDLQTIQQPIDFFGINYYTTATLKDWKKGDREPIVFEHVSTGRPVTDMNWEVNPNGLFDLMVRLKKDYGDIPLYITENGAAYKDRVNEQGEVEDDERVAYIREHLIACHRAIEQGVNLKGYFVFSLFDNFEWAFGYDKRFGIVYVDYETLERIPKKSALWYKETIINNGLKAEKDKRSHHHHHH

SEQ ID NO: 328 - protein, 461 aa, Artificial Sequence
  Derived by Lab Evolution
MLQFPKDFIWGAATSSYQIEGTATGEDKIYSIWDHFSRIPGKIANGDNGDIAIDHYNRYVEDIALMKALHLKAYRFSTSWARLYCETPGKFNEKGLDFYKRLVNELLENGIEPMLTIYHWDMPQALQEKGGWENRDIVQYFQEYAAFLYENLGDVVKKWITHNEPWVVTYLGYGNGEHAPGIQNFTSFLKAAHHVLLSHGEAVKAFRAIGPKDGEVGISLNLTPGYAVDPKDEKAVDAARKWDGFKNRWFLDPVFKGQYPADMLEVYKDYLPDVYKEGDLQTIQQPIDFFGINYYTTATLKDWKKGDREPIVFEHVSTGRPVTDMNWEVNPNGLFDLMVRLKKDYGDIPLYITENGAAYKDRVNEQGEVEDDERVAYIREHLIACHRAIEQGVNLKGYFVFSLFDNFEWAFGYDKRFGIVYVDYETLERIPKKSALWYKETIINNGLKAEKDKRSHHHHHH

SEQ ID NO: 329 - protein, 461 aa, Artificial Sequence
  Derived by Lab Evolution
MLQFPKDFIWGAATSSYQIEGTATGEDKIYSIWDHFSRIPGKIANGDNGDIAIDHYNRYVEDIALMKALHLKAYRFSTSWARLYCETPGKFNEKGLDFYKRLVNELLENGIEPMLTIYHWDMPQALQEKGGWENRDIVQYFQEYAAFLYENLGDVVKKWITHNEPWVVTYLGYGNGEHAPGIQNFTSFLKAAHHVLLSHGEAVKAFRAIGPKDGEVGISLNLTPGYAVDPKDEKAVDAARKWDGFKNRWFLDPVFKGQYPADMLEVYKDYLPDVYKEGDLQTIQQPIDFFGINYYTTATLKDWKKGDREPIVFEHVSTGRPVTDMNWEVNPNGLFDLMVRLKKDYGDIPLYITENGAAYKDRVNEQGEVEDDERVAYIREHLIACHRAIEQGVNLKGYFYWSLFDNFEWAFGYDKRFGIVYVDYETLERIPKKSALWYKETIINNGLKAEKDKRSHHHHHH

SEQ ID NO: 330 - protein, 461 aa, Artificial Sequence
  Derived by Lab Evolution
MLQFPKDFIWGAATSSYQIEGTATGEDKIYSIWDHFSRIPGKIANGDNGDIAIDHYNRYVEDIALMKALHLKAYRFSTSWARLYCETPGKFNEKGLDFYKRLVNELLENGIEPMLTIYHWDMPQALQEKGGWENRDIVQYFQEYAAFLYENLGDVVKKWITHNEPWVVTYLGYGNGEHAPGIQNFTSFLKAAHHVLLSHGEAVKAFRAIGPKDGEVGISLNLTPGYAVDPKDEKAVDAARKWDGFKNRWFLDPVFKGQYPADMLEVYKDYLPDVYKEGDLQTIQQPIDFFGINYYTTATLKDWKKGDREPIVFEHVSTGRPVTDMNWEVNPNGLFDLMVRLKKDYGDIPLYITENGAAYKDRVNEQGEVEDDERVAYIREHLIACHRAIEQGVNLKGYYVFSLFDNFEWAFGYDKRFGIVYVDYETLERIPKKSALWYKETIINNGLKAEKDKRSHHHHHH

SEQ ID NO: 331 - protein, 461 aa, Artificial Sequence
  Derived by Lab Evolution
MLQFPKDFIWGAATSSYQIEGTATGEDKIYSIWDHFSRIPGKIANGDNGDIAIDHYNRYVEDIALMKALHLKAYRFSTSWARLYCETPGKFNEKGLDFYKRLVNELLENGIEPMLTIYHWDMPQALQEKGGWENRDIVQYFQEYAAFLYENLGDVVKKWITHNEPWVVTYLGYGNGEHAPGIQNFTSFLKAAHHVLLSHGEAVKAFRAIGPKDGEVGISLNLTPGYAVDPKDEKAVDAARKWDGFKNRWFLDPVFKGQYPADMLEVYKDYLPDVYKEGDLQTIQQPIDFFGINYYTTATLKDWKKGDREPIVFEHVSTGRPVTDMNWEVNPNGLFDLMVRLKKDYGDIPLYITENGAAYKDRVNEQGEVEDDERVAYIREHLIACHRAIEQGVNLKGYYYWSLFDNFEWAFGYDKRFGIVYVDYETLERIPKKSALWYKETIINNGLKAEKDKRSHHHHHH

SEQ ID NO: 332 - protein, 461 aa, Artificial Sequence
  Derived by Lab Evolution
MLQFPKDFIWGAATSSYQIEGTATGEDKIYSIWDHFSRIPGKIANGDNGDIAIDHYNRYVEDIALMKALHLKAYRFSTSWARLYCETPGKFNEKGLDFYKRLVNELLENGIEPMLTIYHWDMPQALQEKGGWENRDIVQYFQEYAAFLYENLGDVVKKWITHNEPWVVTYLGYGNGEHAPGIQNFTSFLKAAHHVLLSHGEAVKAFRAIGPKDGEVGISLNLTPGYAVDPKDEKAVDAARKWDGFKNRWFLDPVFKGQYPADMLEVYKDYLPDVYKEGDLQTIQQPIDFFGVNYYTTATLKDWKKGDREPIVFEHVSTGRPVTDMNWEVNPNGLFDLMVRLKKDYGDIPLYITENGAAYKDRVNEQGEVEDDERVAYIREHLIACHRAIEQGVNLKGYYVFSLFDNFEWAFGYDKRFGIVYVDYETLERIPKKSALWYKETIINNGLKAEKDKRSHHHHHH

SEQ ID NO: 333 - protein, 461 aa, Artificial Sequence
  Derived by Lab Evolution
MLQFPKDFIWGAATSSYQIEGTATGEDKIYSIWDHFSRIPGKIANGDNGDIAIDHYNRYVEDIALMKALHLKAYRFSTSWARLYCETPGKFNEKGLDFYKRLVNELLENGIEPMLTIYHWDMPQALQEKGGWENRDIVQYFQEYAAFLYENLGNVVKKWITHNEPWVVTYLGYGNGEHAPGIQNFTSFLKAAHHVLLSHGEAVKAFRAIGPKDGEVGISLNLTPGYAVDPKDEKAVDAARKWDGFKNRWFLDPVFKGQYPADMLEVYKDYLPDVYKEGDLQTIQQPIDFFGVNYYSTATLKDWKKGDREPIVFEHVSTGRPVTDMNWEVNPNGLFDLMVRLKKDYGDIPLYITENGAAYKDRVNEQGEVEDDERVAYIREHLIACHRAIEQGVNLKGYFVFSLFDNFEWAFGYDKRFGIVYVDYETLERIPKKSALWYKETIINNGLKAEKDKRSHHHHHH

SEQ ID NO: 334 - protein, 461 aa, Artificial Sequence
  Derived by Lab Evolution
MLQFPKDFIWGAATSSYQIEGTATGEDKIYSIWDHFSRIPGKIANGDNGDIAIDHYNRYVEDIALMKALHLKAYRFSTSWARLYCETPGKFNEKGLDFYKRLVNELLENGIEPMLTIYHWDMPQALQEKGGWENRDIVQYFQEYAAFLYENLGDVVKKWITHNEPWVVTYLGYGNGEHAPGIQNFTSFLKAAHHVLLSHGEAVKAFRAIGPKDGEVGISLNLTPGYAVDPKDEKAVDAARKWDGFMNRWFLDPVFKGQYPADMLEVYKDYLPDVYKEGDLQTIQQPIDFFGINYYTTATLKDWKKGDREPIVFEHVSTGRPVTDMNWEVNPNGLFDLMVRLKKDYGDIPLYITENGAAYKDRVNEQGEVEDDERVAYIREHLIACHRAIEQGVNLKGYFVFSLFDNFEWAFGYDKRFGIVYVDYETLERIPKKSALWYKETIINNGLKAEKDKRSHHHHHH

SEQ ID NO: 335 - protein, 461 aa, Artificial Sequence
  Derived by Lab Evolution
MLQFPKDFIWGAATSSYQIEGTATGEDKIYSIWDHFSRIPGKIANGDNGDIAIDHYNRYVEDIALMKALHLKAYRFSTSWARLYCETPGKFNEKGLDFYKRLVNELLENGIEPMLTIYHWDMPQALQEKGGWENRDIVQYFQEYAAFLYENLGDVVKKWITHNEPWVVTYLGYGNGEHAPGIQNFTSFLKAAHHVLLSHGEAVKAFRAIGPKDGEVGISLNLTPGYAVDPKDEKAVDAARKWDGFMNRWFLDPVFKGQYPADMLEVYKDYLPDVYKEGDLQTIQQPIDFFGINYYTTATLKDWKKGDREPIVFEHVSTGRPVTDMNWEVNPNGLFDLMVRLKKDYGDIPLYITENGAAYKDRVNEQGEVEDDERVAYIREHLIACHRAIEQGVNLKGYFYWSLFDNFEWAFGYDKRFGIVYVDYETLERIPKKSALWYKETIINNGLKAEKDKRSHHHHHH

SEQ ID NO: 336 - protein, 461 aa, Artificial Sequence
  Derived by Lab Evolution
MLQFPKDFIWGAATSSYQIEGTATGEDKIYSIWDHFSRIPGKIANGDNGDIAIDHYNRYVEDIALMKALHLKAYRFSTSWARLYCETPGKFNEKGLDFYKRLVNELLENGIEPMLTIYHWDMPQALQEKGGWENRDIVQYFQEYAAFLYENLGDVVKKWITHNEPWVVTYLGYGNGEHAPGIQNFTSFLKAAHHVLLSHGEAVKAFRAIGPKDGEVGISLNLTPGYAVDPKDEKAVDAARKWDGFMNRWFLDPVFKGQYPADMLEVYKDYLPDVYKEGDLQTIQQPIDFFGVNYYTTATLKDWKKGDREPIVFEHVSTGRPVTDMNWEVNPNGLFDLMVRLKKDYGDIPLYITENGAAYKDRVNEQGEVEDDERVAYIREHLIACHRAIEQGVNLKGYYVFSLFDNFEWAFGYDKRFGIVYVDYETLERIPKKSALWYKETIINNGLKAEKDKRSHHHHHH

SEQ ID NO: 337 - protein, 461 aa, Artificial Sequence
  Derived by Lab Evolution
MLQFPKDFIWGAATSSYQIEGTATGEDKIYSIWDHFSRIPGKIANGDNGDIAIDHYNRYVEDIALMKALHLKAYRFSTSWARLYCETPGKFNEKGLDFYKRLVNELLENGIEPMLTIYHWDMPQALQEKGGWENRDIVQYFQEYAAFLYENLGDVVKKWITHNEPWVVTYLGYGNGEHAPGIQNFTSFLKAAHHVLLSHGEAVKAFRAIGPKDGEVGITLNLTPGYAVDPKDEKAVDAARKWDGFHNRWFLDPVFKGQYPADMLEVYKDYLPDVYKEGDLQTIQQPIDFFGINYYTTATLKDWKKGDREPIVFEHVSTGRPVTDMNWEVNPNGLFDLMVRLKKDYGDIPLYITENGAAYKDRVNEQGEVEDDERVAYIREHLIACHRAIEQGVNLKGYFVFSLFDNFEWAFGYDKRFGIVYVDYETLERIPKKSALWYKETIINNGLKAEKDKRSHHHHHH

SEQ ID NO: 338 - protein, 461 aa, Artificial Sequence
  Derived by Lab Evolution
MLQFPKDFIWGAATSSYQIEGTATGEDKIYSIWDHFSRIPGKIANGDNGDIAIDHYNRYVEDIALMKALHLKAYRFSTSWARLYCETPGKFNEKGLDFYKRLVNELLENGIEPMLTIYHWDMPQALQEKGGWENRDIVQYFQEYAAFLYENLGDVVKKWITHNEPWVVTYLGYGNGEHAPGIQNFTSFLKAAHHVLLSHGEAVKAFRAIGPKDGEVGITLNLTPGYAVDPKDEKAVDAARKWDGFKNRWFLDPVFKGQYPADMLEVYKDYLPDVYKEGDLQTIQQPIDFFGINYYTTATLKDWKKGDREPIVFEHVSTGRPVTDMNWEVNPNGLFDLMVRLKKDYGDIPLYITENGAAYKDRVNEQGEVEDDERVAYIREHLIACHRAIEQGVNLKGYFVFSLFDNFEWAFGYDKRFGIVYVDYETLERIPKKSALWYKETIINNGLKAEKDKRSHHHHHH

SEQ ID NO: 339 - protein, 461 aa, Artificial Sequence
  Derived by Lab Evolution
MLQFPKDFIWGAATSSYQIEGTATGEDKIYSIWDHFSRIPGKIANGDNGDIAIDHYNRYVEDIALMKALHLKAYRFSTSWARLYCETPGKFNEKGLDFYKRLVNELLENGIEPMLTIYHWDMPQALQEKGGWENRDIVQYFQEYAAFLYENLGDVVKKWITHNEPWVVTYLGYGNGEHAPGIQNFTSFLKAAHHVLLSHGEAVKAFRAIGPKDGEVGITLNLTPGYAVDPKDEKAVDAARKWDGFKNRWFLDPVFKGQYPADMLEVYKDYLPDVYKEGDLQTIQQPIDFFGINYYTTATLKDWKKGDREPIVFEHVSTGRPVTDMNWEVNPNGLFDLMVRLKKDYGDIPLYITENGAAYKDRVNEQGEVEDDERVAYIREHLIACHRAIEQGVNLKGYYVFSLFDNFEWAFGYDKRFGIVYVDYETLERIPKKSALWYKETIINNGLKAEKDKRSHHHHHH

SEQ ID NO: 340 - protein, 461 aa, Artificial Sequence
  Derived by Lab Evolution
MLQFPKDFIWGAATSSYQIEGTATGEDKIYSIWDHFSRIPGKIANGDNGDIAIDHYNRYVEDIALMKALHLKAYRFSTSWARLYCETPGKFNEKGLDFYKRLVNELLENGIEPMLTIYHWDMPQALQEKGGWENRDIVQYFQEYAAFLYENLGDVVKKWITHNEPWVVTYLGYGNGEHAPGIQNFTSFLKAAHHVLLSHGEAVKAFRAIGPKDGEIGIALNLTPGYAVDPKDEKAVDAARKWDGFKNRWFLDPVFKGQYPADMLEVYKDYLPDVYKEGDLQTIQQPIDFFGINYYTTATLKDWKKGDREPIVFEHVSTGRPVTDMNWEVNPNGLFDLMVRLKKDYGDIPLYITENGAAYKDRVNEQGEVEDDERVAYIREHLIACHRAIEQGVNLKGYFYWSLFDNFEWAFGYDKRFGIVYVDYETLERIPKKSALWYKETIINNGLKAEKDKRSHHHHHH

SEQ ID NO: 341 - protein, 461 aa, Artificial Sequence
  Derived by Lab Evolution
MLQFPKDFIWGAATSSYQIEGTATGEDKIYSIWDHFSRIPGKIANGDNGDIAIDHYNRYVEDIALMKALHLKAYRFSTSWARLYCETPGKFNEKGLDFYKRLVNELLENGIEPMLTIYHWDMPQALQEKGGWENRDIVQYFQEYAAFLYENLGDVVKKWITHNEPWVVTYLGYGNGEHAPGIQNFTSFLKAAHHVLLSHGEAVKAFRAIGPKDGEIGIALNLTPGYAVDPKDEKAVDAARKWDGFKNRWFLDPVFKGQYPADMLEVYKDYLPDVYKEGDLQTIQQPIDFFGINYYTTATLKDWKKGDREPIVFEHVSTGRPVTDMNWEVNPNGLFDLMVRLKKDYGDIPLYITENGAAYKDRVNEQGEVEDDERVAYIREHLIACHRAIEQGVNLKGYYYWSLFDNFEWAFGYDKRFGIVYVDYETLERIPKKSALWYKETIINNGLKAEKDKRSHHHHHH

SEQ ID NO: 342 - protein, 461 aa, Artificial Sequence
  Derived by Lab Evolution
MLQFPKDFIWGAATSSYQIEGTATGEDKIYSIWDHFSRIPGKIANGDNGDIAIDHYNRYVEDIALMKALHLKAYRFSTSWARLYCETPGKFNEKGLDFYKRLVNELLENGIEPMLTIYHWDMPQALQEKGGWENRDIVQYFQEYAAFLYENLGDVVKKWITHNEPWVVTYLGYGNGEHAPGIQNFTSFLKAAHHVLLSHGEAVKAFRAIGPKDGEIGIALNLTPGYAVDPKDEKAVDAARKWDGFKNRWFLDPVFKGQYPADMLEVYKDYLPDVYKEGDLQTIQQPIDFFGVNYYTTATLKDWKKGDREPIVFEHVSTGRPVTDMNWEVNPNGLFDLMVRLKKDYGDIPLYITENGAAYKDRVNEQGEVEDDERVAYIREHLIACHRAIEQGVNLKGYYYWSLFDNFEWAFGYDKRFGIVYVDYETLERIPKKSALWYKETIINNGLKAEKDKRSHHHHHH

SEQ ID NO: 343 - protein, 461 aa, Artificial Sequence
  Derived by Lab Evolution
MLQFPKDFIWGAATSSYQIEGTATGEDKIYSIWDHFSRIPGKIANGDNGDIAIDHYNRYVEDIALMKALHLKAYRFSTSWARLYCETPGKFNEKGLDFYKRLVNELLENGIEPMLTIYHWDMPQALQEKGGWENRDIVQYFQEYAAFLYENLGDVVKKWITHNEPWVVTYLGYGNGEHAPGIQNFTSFLKAAHHVLLSHGEAVKAFRAIGPKDGEIGIALNLTPGYAVDPKDEKAVDAARKWDGFMNRWFLDPVFKGQYPADMLEVYKDYLPDVYKEGDLQTIQQPIDFFGINYYTTATLKDWKKGDREPIVFEHVSTGRPVTDMNWEVNPNGLFDLMVRLKKDYGDIPLYITENGAAYKDRVNEQGEVEDDERVAYIREHLIACHRAIEQGVNLKGYFVFSLFDNFEWAFGYDKRFGIVYVDYETLERIPKKSALWYKETIINNGLKAEKDKRSHHHHHH

SEQ ID NO: 344 - protein, 461 aa, Artificial Sequence
  Derived by Lab Evolution
MLQFPKDFIWGAATSSYQIEGTATGEDKIYSIWDHFSRIPGKIANGDNGDIAIDHYNRYVEDIALMKALHLKAYRFSTSWARLYCETPGKFNEKGLDFYKRLVNELLENGIEPMLTIYHWDMPQALQEKGGWENRDIVQYFQEYAAFLYENLGDVVKKWITHNEPWVVTYLGYGNGEHAPGIQNFTSFLKAAHHVLLSHGEAVKAFRAIGPKDGEIGIALNLTPGYAVDPKDEKAVDAARKWDGFMNRWFLDPVFKGQYPADMLEVYKDYLPDVYKEGDLQTIQQPIDFFGVNYYTTATLKDWKKGDREPIVFEHVSTGRPVTDMNWEVNPNGLFDLMVRLKKDYGDIPLYITENGAAYKDRVNEQGEVEDDERVAYIREHLIACHRAIEQGVNLKGYYVFSLFDNFEWAFGYDKRFGIVYVDYETLERIPKKSALWYKETIINNGLKAEKDKRSHHHHHH

SEQ ID NO: 345 - protein, 461 aa, Artificial Sequence
  Derived by Lab Evolution
MLQFPKDFIWGAATSSYQIEGTATGEDKIYSIWDHFSRIPGKIANGDNGDIAIDHYNRYVEDIALMKALHLKAYRFSTSWARLYCETPGKFNEKGLDFYKRLVNELLENGIEPMLTIYHWDMPQALQEKGGWENRDIVQYFQEYAAFLYENLGDVVKKWITHNEPWVVTYLGYGNGEHAPGIQNFTSFLKAAHHVLLSHGEAVKAFRAIGPKDGEIGISLNLTPGYAVDPKDEKAVDAARKWDGFHNRWFLDPVFKGQYPADMLEVYKDYLPDVYKEGDLQTIQQPIDFFGINYYTTATLKDWKKGDREPIVFEHVSTGRPVTDMNWEVNPNGLFDLMVRLKKDYGDIPLYITENGAAYKDRVNEQGEVEDDERVAYIREHLIACHRAIEQGVNLKGYYYWSLFDNFEWAFGYDKRFGIVYVDYETLERIPKKSALWYKETIINNGLKAEKDKRSHHHHHH

SEQ ID NO: 346 - protein, 461 aa, Artificial Sequence
  Derived by Lab Evolution
MLQFPKDFIWGAATSSYQIEGTATGEDKIYSIWDHFSRIPGKIANGDNGDIAIDHYNRYVEDIALMKALHLKAYRFSTSWARLYCETPGKFNEKGLDFYKRLVNELLENGIEPMLTIYHWDMPQALQEKGGWENRDIVQYFQEYAAFLYENLGDVVKKWITHNEPWVVTYLGYGNGEHAPGIQNFTSFLKAAHHVLLSHGEAVKAFRAIGPKDGEIGISLNLTPGYAVDPKDEKAVDAARKWDGFKNRWFLDPVFKGQYPADMLEVYKDYLPDVYKEGDLQTIQQPIDFFGINYYTTATLKDWKKGDREPIVFEHVSTGRPVTDMNWEVNPNGLFDLMVRLKKDYGDIPLYITENGAAYKDRVNEQGEVEDDERVAYIREHLIACHRAIEQGVNLKGYFYWSLFDNFEWAFGYDKRFGIVYVDYETLERIPKKSALWYKETIINNGLKAEKDKRSHHHHHH

SEQ ID NO: 347 - protein, 461 aa, Artificial Sequence
  Derived by Lab Evolution
MLQFPKDFIWGAATSSYQIEGTATGEDKIYSIWDHFSRIPGKIANGDNGDIAIDHYNRYVEDIALMKALHLKAYRFSTSWARLYCETPGKFNEKGLDFYKRLVNELLENGIEPMLTIYHWDMPQALQEKGGWENRDIVQYFQEYAAFLYENLGDVVKKWITHNEPWVVTYLGYGNGEHAPGIQNFTSFLKAAHHVLLSHGEAVKAFRAIGPKDGEIGISLNLTPGYAVDPKDEKAVDAARKWDGFKNRWFLDPVFKGQYPADMLEVYKDYLPDVYKEGDLQTIQQPIDFFGINYYTTATLKDWKKGDREPIVFEHVSTGRPVTDMNWEVNPNGLFDLMVRLKKDYGDIPLYITENGAAYKDRVNEQGEVEDDERVAYIREHLIACHRAIEQGVNLKGYYVFSLFDNFEWAFGYDKRFGIVYVDYETLERIPKKSALWYKETIINNGLKAEKDKRSHHHHHH

SEQ ID NO: 348 - protein, 461 aa, Artificial Sequence
  Derived by Lab Evolution
MLQFPKDFIWGAATSSYQIEGTATGEDKIYSIWDHFSRIPGKIANGDNGDIAIDHYNRYVEDIALMKALHLKAYRFSTSWARLYCETPGKFNEKGLDFYKRLVNELLENGIEPMLTIYHWDMPQALQEKGGWENRDIVQYFQEYAAFLYENLGDVVKKWITHNEPWVVTYLGYGNGEHAPGIQNFTSFLKAAHHVLLSHGEAVKAFRAIGPKDGEIGISLNLTPGYAVDPKDEKAVDAARKWDGFKNRWFLDPVFKGQYPADMLEVYKDYLPDVYKEGDLQTIQQPIDFFGINYYTTATLKDWKKGDREPIVFEHVSTGRPVTDMNWEVNPNGLFDLMVRLKKDYGDIPLYITENGAAYKDRVNEQGEVEDDERVAYIREHLIACHRAIEQGVNLKGYYYWSLFDNFEWAFGYDKRFGIVYVDYETLERIPKKSALWYKETIINNGLKAEKDKRSHHHHHH

SEQ ID NO: 349 - protein, 461 aa, Artificial Sequence
  Derived by Lab Evolution
MLQFPKDFIWGAATSSYQIEGTATGEDKIYSIWDHFSRIPGKIANGDNGDIAIDHYNRYVEDIALMKALHLKAYRFSTSWARLYCETPGKFNEKGLDFYKRLVNELLENGIEPMLTIYHWDMPQALQEKGGWENRDIVQYFQEYAAFLYENLGDVVKKWITHNEPWVVTYLGYGNGEHAPGIQNFTSFLKAAHHVLLSHGEAVKAFRAIGPKDGEIGISLNLTPGYAVDPKDEKAVDAARKWDGFKNRWFLDPVFKGQYPADMLEVYKDYLPDVYKEGDLQTIQQPIDFFGVNYYTTATLKDWKKGDREPIVFEHVSTGRPVTDMNWEVNPNGLFDLMVRLKKDYGDIPLYITENGAAYKDRVNEQGEVEDDERVAYIREHLIACHRAIEQGVNLKGYFYWSLFDNFEWAFGYDKRFGIVYVDYETLERIPKKSALWYKETIINNGLKAEKDKRSHHHHHH

SEQ ID NO: 350 - protein, 461 aa, Artificial Sequence
  Derived by Lab Evolution
MLQFPKDFIWGAATSSYQIEGTATGEDKIYSIWDHFSRIPGKIANGDNGDIAIDHYNRYVEDIALMKALHLKAYRFSTSWARLYCETPGKFNEKGLDFYKRLVNELLENGIEPMLTIYHWDMPQALQEKGGWENRDIVQYFQEYAAFLYENLGDVVKKWITHNEPWVVTYLGYGNGEHAPGIQNFTSFLKAAHHVLLSHGEAVKAFRAIGPKDGEIGISLNLTPGYAVDPKDEKAVDAARKWDGFMNRWFLDPVFKGQYPADMLEVYKDYLPDVYKEGDLQTIQQPIDFFGINYYTTATLKDWKKGDREPIVFEHVSTGRPVTDMNWEVNPNGLFDLMVRLKKDYGDIPLYITENGAAYKDRVNEQGEVEDDERVAYIREHLIACHRAIEQGVNLKGYFVFSLFDNFEWAFGYDKRFGIVYVDYETLERIPKKSALWYKETIINNGLKAEKDKRSHHHHHH

SEQ ID NO: 351 - protein, 461 aa, Artificial Sequence
  Derived by Lab Evolution
MLQFPKDFIWGAATSSYQIEGTATGEDKIYSIWDHFSRIPGKIANGDNGDIAIDHYNRYVEDIALMKALHLKAYRFSTSWARLYCETPGKFNEKGLDFYKRLVNELLENGIEPMLTIYHWDMPQALQEKGGWENRDIVQYFQEYAAFLYENLGDVVKKWITHNEPWVVTYLGYGNGEHAPGIQNFTSFLKAAHHVLLSHGEAVKAFRAIGPKDGEIGISLNLTPGYAVDPKDEKAVDAARKWDGFMNRWFLDPVFKGQYPADMLEVYKDYLPDVYKEGDLQTIQQPIDFFGVNYYTTATLKDWKKGDREPIVFEHVSTGRPVTDMNWEVNPNGLFDLMVRLKKDYGDIPLYITENGAAYKDRVNEQGEVEDDERVAYIREHLIACHRAIEQGVNLKGYFVFSLFDNFEWAFGYDKRFGIVYVDYETLERIPKKSALWYKETIINNGLKAEKDKRSHHHHHH

SEQ ID NO: 352 - protein, 461 aa, Artificial Sequence
  Derived by Lab Evolution
MLQFPKDFIWGAATSSYQIEGTATGEDKIYSIWDHFSRIPGKIANGDNGDIAIDHYNRYVEDIALMKALHLKAYRFSTSWARLYCETPGKFNEKGLDFYKRLVNELLENGIEPMLTIYHWDMPQALQEKGGWENRDIVQYFQEYAAFLYENLGDVVKKWITHNEPWVVTYLGYGNGEHAPGIQNFTSFLKAAHHVLLSHGEAVKAFRAIGPKDGEIGISLNLTPGYAVDPKDEKAVDAARKWDGFMNRWFLDPVFKGQYPADMLEVYKDYLPDVYKEGDLQTIQQPIDFFGVNYYTTATLKDWKKGDREPIVFEHVSTGRPVTDMNWEVNPNGLFDLMVRLKKDYGDIPLYITENGAAYKDRVNEQGEVEDDERVAYIREHLIACHRAIEQGVNLKGYFYWSLFDNFEWAFGYDKRFGIVYVDYETLERIPKKSALWYKETIINNGLKAEKDKRSHHHHHH

SEQ ID NO: 353 - protein, 461 aa, Artificial Sequence
  Derived by Lab Evolution
MLQFPKDFIWGAATSSYQIEGTATGEDKIYSIWDHFSRIPGKIANGDNGDIAIDHYNRYVEDIALMKALHLKAYRFSTSWARLYCETPGKFNEKGLDFYKRLVNELLENGIEPMLTIYHWDMPQALQEKGGWENRDIVQYFQEYAAFLYENLGDVVKKWITHNEPWVVTYLGYGNGEHAPGIQNFTSFLKAAHHVLLSHGEAVKAFRAIGPKDGEIGITLNLTPGYAVDPKDEKAVDAARKWDGFKNRWFLDPVFKGQYPADMLEVYKDYLPDVYKEGDLQTIQQPIDFFGINYYTTATLKDWKKGDREPIVFEHVSTGRPVTDMNWEVNPNGLFDLMVRLKKDYGDIPLYITENGAAYKDRVNEQGEVEDDERVAYIREHLIACHRAIEQGVNLKGYYVFSLFDNFEWAFGYDKRFGIVYVDYETLERIPKKSALWYKETIINNGLKAEKDKRSHHHHHH

SEQ ID NO: 354 - protein, 461 aa, Artificial Sequence
  Derived by Lab Evolution
MLQFPKDFIWGAATSSYQIEGTATGEDKIYSIWDHFSRIPGKIANGDNGDIAIDHYNRYVEDIALMKALHLKAYRFSTSWARLYCETPGKFNEKGLDFYKRLVNELLENGIEPMLTIYHWDMPQALQEKGGWENRDIVQYFQEYAAFLYENLGDVVKKWITHNEPWVVTYLGYGNGEHAPGIQNFTSFLKAAHHVLLSHGEAVKAFRAIGPKDGEIGITLNLTPGYAVDPKDEKAVDAARKWDGFKNRWFLDPVFKGQYPADMLEVYKDYLPDVYKEGDLQTIQQPIDFFGVNYYTTATLKDWKKGDREPIVFEHVSTGRPVTDMNWEVNPNGLFDLMVRLKKDYGDIPLYITENGAAYKDRVNEQGEVEDDERVAYIREHLIACHRAIEQGVNLKGYYVFSLFDNFEWAFGYDKRFGIVYVDYETLERIPKKSALWYKETIINNGLKAEKDKRSHHHHHH

SEQ ID NO: 355 - protein, 461 aa, Artificial Sequence
  Derived by Lab Evolution
MLQFPKDFIWGAATSSYQIEGTATGEDKIYSIWDHFSRIPGKIANGDNGDIAIDHYNRYVEDIALMKALHLKAYRFSTSWARLYCETPGKFNEKGLDFYKRLVNELLENGIEPMLTIYHWDMPQALQEKGGWENRDIVQYFQEYAAFLYENLGDVVKKWITHNEPWVVTYLGYGNGEHAPGIQNFTSFLKAAHHVLLSHGEAVKAFRAIGPKDGEIGITLNLTPGYAVDPKDEKAVDAARKWDGFMNRWFLDPVFKGQYPADMLEVYKDYLPDVYKEGDLQTIQQPIDFFGINYYTTATLKDWKKGDREPIVFEHVSTGRPVTDMNWEVNPNGLFDLMVRLKKDYGDIPLYITENGAAYKDRVNEQGEVEDDERVAYIREHLIACHRAIEQGVNLKGYFVFSLFDNFEWAFGYDKRFGIVYVDYETLERIPKKSALWYKETIINNGLKAEKDKRSHHHHHH

SEQ ID NO: 356 - protein, 447 aa, Artificial Sequence
  Derived by Lab Evolution
MSIQRDDFPADFVWGTATAAYQIEGAVDEDGRAPSIWDTFSHTPGKTRDGDTGDTACDHYHRYREDVALMRELGVNAYRFSIAWPRVLPQGRGVVNGAGLDFYDRLVDALLGAGITPWATLYHWDLPQALEDAGGWPRRDTAYALAEYAAVVGRRLGDRLKRWITLNEPWCSAYLGYGNGVHAPGRQDFALSLQAAHHLLLGHGLATEALRAAVPGAQVGVALNLTPTHPATPDPRDLEAARRYDGFHNRWYLDPLFGFGYPLDMWELYGPMVPHVEPEDLRRIAVPLDFLGINYYTRSVVRHAEQGPLLVEHVRPEGEYTYMNWEVYPDGIREIVARVAREYRPRSIYITENGACYPDGVEGDGEIHDSKRLEYYRSHLSKCAQAIREGAPLKGYFAWSLLDNFEWAEGYDKRFGLFYVNFATQERRLKQSGRWLKGFLEGAAEAG

SEQ ID NO: 357 - protein, 447 aa, Artificial Sequence
  Derived by Lab Evolution
MSIQRDDFPAHFVWGTATAAYQIEGAVDEDGRAPSIWDTFSHTPGKTRDGDTGDTACDHYHRYREDVALMRELGVNAYRFSIAWPRVLPQGRGVVNGAGLDFYDRLVDALLGAGITPWATLYHWDLPQALEDAGGWPRRDTAYALAEYAAVVGRRLGDRLKRWITLNEPWCSAYLGYGNGVHAPGRQDFALSLQAAHHLLLGHGLATEALRAAVPGAQVGVTLNLTPTHPATPDPRDLEAARRYDGFHNRWYLDPLFGFGYPLDMWELYGPMVPHVEPEDLRRIAVPLDFLGVNYYTRSVVRHAEQGPLLVEHVHPEGEYTYMNWEVYPDGIREIVARVAREYRPRSIYITENGACYPDGVEDDGEIHDSKRLEYYRSHLSKCAQAIREGAPLKGYFAWSLLDNFEWAEGYDKRFGLFYVNFATQERRLKQSGRWLKGFLEGAAEAG

SEQ ID NO: 358 - protein, 447 aa, Artificial Sequence
  Derived by Lab Evolution
MSIQRDDFPADFVWGTATAAYQIEGAVDEDGRAPSIWDTFSHTPGKTRDGDTGDTACDHYHRYREDVALMRELGVNAYRFSIAWPRVLPQGRGVVNGAGLDFYDRLVDALLGAGITPWATLYHWDLPQALEDAGGWPRRDTAYALAEYAAVVGRRLGDRLKRWITLNEPWCSAYLGYGNGVHAPGRQDFALSLQAAHHLLLGHGLATEALRAAVPGAQVGVALNLTPTHPATPDPRDLEAARRYDGFHNRWYLDPLFGFGYPLDMWELYGPMVPHVEPEDLRRIAVPLDFLGINYYTRSVVRHAEQGPLLVEHVRPEGEYTYMNWEVYPDGIREIVARVAREYRPRSIYITENGACYPDGVEDDGEIHDSKRLEYYRSHLSKCAQAIREGAPLKGYFAWSLLDNFEWAEGYDKRFGLFYVNFATQERRLKQSGRWLKGFLEGAAEAG

SEQ ID NO: 359 - protein, 447 aa, Artificial Sequence
  Derived by Lab Evolution
MSIQRDDFPADFVWGTATAAYQIEGAVDEDGRAPSIWDTFSHTPGKTRDGDTGDTACDHYHRYREDVALMRELGVNAYRFSIAWPRVLPQGRGVVNGAGLDFYDRLVDALLGAGITPWATLYHWDLPQALEDAGGWPRRDTAYALAEYAAVVGRRLGDRLKRWITLNEPWCSAYLGYGNGVHAPGRQDFALSLQAAHHLLLGHGLATEALRAAVPGAQVGVTLNLTPTHPATPDPRDLEAARRYDGFHNRWYLDPLFGFGYPLDMWELYGPMVPHVEPEDLRRIAVPLDFLGINYYTRSVVRRAEQGPLLVEHVRPEGEYTYMNWEVYPDGIREIVARVAREYRPRSIYITENGACYPDGVEDDGEIHDSKRLEYYRSHLSKCAQAIREGAPLKGYFAWSLLDNFEWAEGYDKRFGLFYVNFATQERRLKQSGRWLKGFLEGAAEAG

SEQ ID NO: 360 - protein, 447 aa, Artificial Sequence
  Derived by Lab Evolution
MSIQRDDFPAHFVWGTATAAYQIEGAVDEDGRAPSIWDTFSHTPGKTRDGDTGDTACDHYHRYREDVALMRELGVNAYRFSIAWPRVLPQGRGVVNGAGLDFYDRLVDALLGAGITPWATLYHWDLPQALEDAGGWPRRDTAYALAEYAAVVGRRLGDRLKRWITLNEPWCSAYLGYGNGVHAPGRQDFALSLQAAHHLLLGHGLATEALRAAVPGAQVGVTLNLTPTHPATPDPRDLEAARRYHGFHNRWYLDPLFGFGYPLDMWELYGPMVPHVEPEDLRRIAVPLDFLGVNYYTRSVVRHAEQGPLLVEHVRPEGEYTYMNWEVYPDGIREIVARVAREYRPRSIYITENGACYPDGVEDDGEIHDSKRLEYYRSHLSKCAQAIREGAPLKGYFAWSLLDNFEWAEGYDKRFGLFYVNFATQERRLKQSGRWLKGFLEGAAEAG

SEQ ID NO: 361 - protein, 447 aa, Artificial Sequence
  Derived by Lab Evolution
MSIQRDDFPAHFVWGTATAAYQIEGAVDEDGRAPSIWDTFSHTPGKTRDGDTGDTACDHYHRYREDVALMRELGVNAYRFSIAWPRVLPQGRGVVNGAGLDFYDRLVDALLGAGITPWATLYHWDLPQALEDAGGWPRRDTAYALAEYAAVVGRRLGDRLKRWITLNEPWCSAYLGYGNGVHAPGRQDFALSLQAAHHLLLGHGLATEALRAAVPGAQVGVALNLTPTHPATPDPRDLEAARRYDGFHNRWYLDPLFGFGYPLDMWELYGPMVPHVEPEDLRRIAVPLDFLGVNYYTRSVVRHAEQGPLLVEHVRPEGEYTYMNWEVYPDGIREIVARVAREYRPRSIYITENGACYPDGVEDDGEIHDSKRLEYYRSHLSKCAQAIREGAPLKGYFAWSLLDNFEWAEGYDKRFGLFYVNFATQERRLKQSGRWLKGFLEGAAEAG

SEQ ID NO: 362 - protein, 447 aa, Artificial Sequence
  Derived by Lab Evolution
MSIQRDDFPADFVWGTATAAYQIEGAVDEDGRAPSIWDTFSHTPGKTRDGDTGDTACDHYHRYREDVALMRELGVNAYRFSIAWPRVLPQGRGVVNGAGLDFYDRLVDALLGAGITPWATLYHWDLPQALEDAGGWPRRDTAYALAEYAAVVGRRLGDRLKRWITLNEPWCSAYLGYGNGVHAPGRQDFALSLQAAHHLLLGHGLATEALRAAVPGAQVGVALNLTPTHPATPDPRDLEAARRYDGFHNRWYLDPLFGFGYPLDMWELYGPMVPHVEPEDLRRIAVPLDFLGVNYYTRSVVRHAEQGPLLVEHVRPEGEYTYMNWEVYPDGIREIVARVAREYRPRSIYITENGACYPDGVEDDGEIHDSKRLEYYRSHLSKCAQAIREGAPLKGYFAWSLLDNFEWAEGYDKRFGLFYVNFATQERRLKQSGRWLKGFLEGAAEAG

SEQ ID NO: 363 - protein, 447 aa, Artificial Sequence
  Derived by Lab Evolution
MSIQRDDFPAHFVWGTATAAYQIEGAVDEDGRAPSIWDTFSHTPGKTRDGDTGDTACDHYHRYREDVALMRELGVNAYRFSIAWPRVLPQGRGVVNGAGLDFYDRLVDALLGAGITPWATLYHWDLPQALEDAGGWPRRDTAYALAEYAAVVGRRLGDRLKRWITLNEPWCSAYLGYGNGVHAPGRQDFALSLQAAHHLLLGHGLATEALRAAVPGAQVGVSLNLTPTHPATPDPRDLEAARRYDGFHNRWYLDPLFGFGYPLDMWELYGPMVPHVEPEDLRRIAVPLDFLGVNYYTRSVVRHAEQGPLLVEHVRPEGEYTYMNWEVYPDGIREIVARVAREYRPRSIYITENGACYPDGVEDDGEIHDSKRLEYYRSHLSKCAQAIREGAPLKGYFAWSLLDNFEWAEGYDKRFGLFYVNFATQERRLKQSGRWLKGFLEGAAEAG

SEQ ID NO: 364 - protein, 447 aa, Artificial Sequence
  Derived by Lab Evolution
MSIQRDDFPADFVWGTATAAYQIEGAVDEDGRAPSIWDTFSHTPGKTRDGDTGDTACDHYHRYREDVALMRELGVNAYRFSIAWPRVLPQGRGVVNGAGLDFYDRLVDALLGAGITPWATLYHWDLPQALEDAGGWPRRDTAYALAEYAAVVGRRLGDRLKRWITLNEPWCSAYLGYGNGVHAPGRQDFALSLQAAHHLLLGHGLATEALRAAVPGAQVGVSLNLTPTHPATPDPRDLEAARRYDGFHNRWYLDPLFGFGYPLDMWELYGPMVPHVEPEDLRRIAVPLDFLGVNYYTRSVVRHAEQGPLLVEHVRPEGEYTYMNWEVYPDGIREIVARVAREYRPRSIYITENGACYPDGVEDDGEIHDSKRLEYYRSHLSKCAQAIREGAPLKGYFAWSLLDNFEWAEGYDKRFGLFYVNFATQERRLKQSGRWLKGFLEGAAEAG

SEQ ID NO: 365 - protein, 447 aa, Artificial Sequence
  Derived by Lab Evolution
MSIQRDDFPAHFVWGTATAAYQIEGAVDEDGRAPSIWDTFSHTPGKTRDGDTGDTACDHYHRYREDVALMRELGVNAYRFSIAWPRVLPQGRGVVNGAGLDFYDRLVDALLGAGITPWATLYHWDLPQALEDAGGWPRRDTAYALAEYAAVVGRRLGDRLKRWITLNEPWCSAYLGYGNGVHAPGRQDFALSLQAAHHLLLGHGLATEALRAAVPGAQVGVTLNLTPTHPATPDPRDLEAARRYDGFHNRWYLDPLFGFGYPLDMWELYGPMVPHVEPEDLRRIAVPLDFLGVNYYTRSVVRHAEQGPLLVEHVRPEGEYTYMNWEVYPDGIREIVARVAREYRPRSIYITENGACYPDGVEDDGEIHDSKRLEYYRSHLSKCAQAIREGAPLKGYFAWSLLDNFEWAEGYDKRFGLFYVNFATQERRLKQSGRWLKGFLEGAAEAG

SEQ ID NO: 366 - protein, 447 aa, Artificial Sequence
  Derived by Lab Evolution
MSIQRDDFPADFVWGTATAAYQIEGAVDEDGRAPSIWDTFSHTPGKTRDGDTGDTACDHYHRYREDVALMRELGVNAYRFSIAWPRVLPQGRGVVNGAGLDFYDRLVDALLGAGITPWATLYHWDLPQALEDAGGWPRRDTAYALAEYAAVVGRRLGDRLKRWITLNEPWCSAYLGYGNGVHAPGRQDFALSLQAAHHLLLGHGLATEALRAAVPGAQVGVTLNLTPTHPATPDPRDLEAARRYDGFHNRWYLDPLFGFGYPLDMWELYGPMVPHVEPEDLRRIAVPLDFLGVNYYTRSVVRHAEQGPLLVEHVRPEGEYTYMNWEVYPDGIREIVARVAREYRPRSIYITENGACYPDGVEDDGEIHDSKRLEYYRSHLSKCAQAIREGAPLKGYFAWSLLDNFEWAEGYDKRFGLFYVNFATQERRLKQSGRWLKGFLEGAAEAG

SEQ ID NO: 367 - protein, 447 aa, Artificial Sequence
  Derived by Lab Evolution
MSIQRDDFPADFVWGTATAAYQIEGAVDEDGRAPSIWDTFSHTPGKTRDGDTGDTACDHYHRYREDVALMRELGVNAYRFSIAWPRVLPQGRGVVNGAGLDFYDRLVDALLGAGITPWATLYHWDLPQALEDAGGWPRRDTAYALAEYAAVVGRRLGDRLKRWITLNEPWCSAYLGYGNGVHAPGRQDFALSLQAAHHLLLGHGLATEALRAAVPGAQVGVALNLTPTHPATPDPRDLEAARRYDGFKNRWYLDPLFGFGYPLDMWELYGPMVPHVEPEDLRRIAVPLDFLGVNYYTRSVVRHAEQGPLLVEHVRPEGEYTYMNWEVYPDGIREIVARVAREYRPRSIYITENGACYPDGVEDDGEIHDSKRLEYYRSHLSKCAQAIREGAPLKGYFAWSLLDNFEWAEGYDKRFGLFYVNFATQERRLKQSGRWLKGFLEGAAEAG

SEQ ID NO: 368 - protein, 447 aa, Artificial Sequence
  Derived by Lab Evolution
MSIQRDDFPADFVWGTATAAYQIEGAVDEDGRAPSIWDTFSHTPGKTRDGDTGDTACDHYHRYREDVALMRELGVNAYRFSIAWPRVLPQGRGVVNGAGLDFYDRLVDALLGAGITPWATLYHWDLPQALEDAGGWPRRDTAYALAEYAAVVGRRLGDRLKRWITLNEPWCSAYLGYGNGVHAPGRQDFALSLQAAHHLLLGHGLATEALRAAVPGAQVGVSLNLTPTHPATPDPRDLEAARRYDGFKNRWYLDPLFGFGYPLDMWELYGPMVPHVEPEDLRRIAVPLDFLGVNYYTRSVVRHAEQGPLLVEHVRPEGEYTYMNWEVYPDGIREIVARVAREYRPRSIYITENGACYPDGVEDDGEIHDSKRLEYYRSHLSKCAQAIREGAPLKGYFAWSLLDNFEWAEGYDKRFGLFYVNFATQERRLKQSGRWLKGFLEGAAEAG

SEQ ID NO: 369 - protein, 447 aa, Artificial Sequence
  Derived by Lab Evolution
MSIQRDDFPADFVWGTATAAYQIEGAVDEDGRAPSIWDTFSHTPGKTRDGDTGDTACDHYHRYREDVALMRELGVNAYRFSIAWPRVLPQGRGVVNGAGLDFYDRLVDALLGAGITPWATLYHWDLPQALEDAGGWPRRDTAYALAEYAAVVGRRLGDRLKRWITLNEPWCSAYLGYGNGVHAPGRQDFALSLQAAHHLLLGHGLATEALRAAVPGAQVGVTLNLTPTHPATPDPRDLEAARRYDGFKNRWYLDPLFGFGYPLDMWELYGPMVPHVEPEDLRRIAVPLDFLGVNYYTRSVVRHAEQGPLLVEHVRPEGEYTYMNWEVYPDGIREIVARVAREYRPRSIYITENGACYPDGVEDDGEIHDSKRLEYYRSHLSKCAQAIREGAPLKGYFAWSLLDNFEWAEGYDKRFGLFYVNFATQERRLKQSGRWLKGFLEGAAEAG

SEQ ID NO: 370 - protein, 447 aa, Artificial Sequence
  Derived by Lab Evolution
MSIQRDDFPADFVWGTATAAYQIEGAVDEDGRAPSIWDTFSHTPGKTRDGDTGDTACDHYHRYREDVALMRELGVNAYRFSIAWPRVLPQGRGVVNGAGLDFYDRLVDALLGAGITPWATLYHWDLPQALEDAGGWPRRDTAYALAEYAAVVGRRLGDRLKRWITLNEPWCSAYLGYGNGVHAPGRQDFALSLQAAHHLLLGHGLATEALRAAVPGAQVGVALNLTPTHPATPDPRDLEAARRYDGFFNRWYLDPLFGFGYPLDMWELYGPMVPHVEPEDLRRIAVPLDFLGVNYYTRSVVRHAEQGPLLVEHVRPEGEYTYMNWEVYPDGIREIVARVAREYRPRSIYITENGACYPDGVEDDGEIHDSKRLEYYRSHLSKCAQAIREGAPLKGYFAWSLLDNFEWAEGYDKRFGLFYVNFATQERRLKQSGRWLKGFLEGAAEAG

SEQ ID NO: 371 - protein, 447 aa, Artificial Sequence
  Derived by Lab Evolution
MSIQRDDFPADFVWGTATAAYQIEGAVDEDGRAPSIWDTFSHTPGKTRDGDTGDTACDHYHRYREDVALMRELGVNAYRFSIAWPRVLPQGRGVVNGAGLDFYDRLVDALLGAGITPWATLYHWDLPQALEDAGGWPRRDTAYALAEYAAVVGRRLGDRLKRWITLNEPWCSAYLGYGNGVHAPGRQDFALSLQAAHHLLLGHGLATEALRAAVPGAQVGVTLNLTPTHPATPDPRDLEAARRYHGFHNRWYLDPLFGFGYPLDMWELYGPMVPHVEPEDLRRIAVPLDFLGINYYTRSVVRHAEQGPLLVEHVRPEGEYTYMNWEVYPDGIREIVARVAREYRPRSIYITENGACYPDGVEDDGEIHDSKRLEYYRSHLSKCAQAIREGAPLKGYFAWSLLDNFEWAEGYDKRFGLFYVNFATQERRLKQSGRWLKGFLEGAAEAG

SEQ ID NO: 372 - protein, 447 aa, Artificial Sequence
  Derived by Lab Evolution
MSIQRDDFPAHFVWGTATAAYQIEGAVDEDGRAPSIWDTFSHTPGKTRDGDTGDTACDHYHRYREDVALMRELGVNAYRFSIAWPRVLPQGRGVVNGAGLDFYDRLVDALLGAGITPWATLYHWDLPQALEDAGGWPRRDTAYALAEYAAVVGRRLGDRLKRWITLNEPWCSAYLGYGNGVHAPGRQDFALSLQAAHHLLLGHGLATEALRAAVPGAQVGVALNLTPTHPATPDPRDLEAARRYDGFHNRWYLDPLFGFGYPLDMWELYGPMVPHVEPEDLRRIAVPLDFLGINYYTRSVVRHAEQGPLLVEHVRPEGEYTYMNWEVYPDGIREIVARVAREYRPRSIYITENGACYPDGVEDDGEIHDSKRLEYYRSHLSKCAQAIREGAPLKGYFAWSLLDNFEWAEGYDKRFGLFYVNFATQERRLKQSGRWLKGFLEGAAEAG

SEQ ID NO: 373 - protein, 447 aa, Artificial Sequence
  Derived by Lab Evolution
MSIQRDDFPADFVWGTATAAYQIEGAVDEDGRAPSIWDTFSHTPGKTRDGDTGDTACDHYHRYREDVALMRELGVNAYRFSIAWPRVLPQGRGVVNGAGLDFYDRLVDALLGAGITPWATLYHWDLPQALEDAGGWPRRDTAYALAEYAAVVGRRLGDRLKRWITLNEPWCSAYLGYGNGVHAPGRQDFALSLQAAHHLLLGHGLATEALRAAVPGAQVGVSLNLTPTHPATPDPRDLEAARRYDGFHNRWYLDPLFGFGYPLDMWELYGPMVPHVEPEDLRRIAVPLDFLGINYYTRSVVRHAEQGPLLVEHVRPEGEYTYMNWEVYPDGIREIVARVAREYRPRSIYITENGACYPDGVEDDGEIHDSKRLEYYRSHLSKCAQAIREGAPLKGYFAWSLLDNFEWAEGYDKRFGLFYVNFATQERRLKQSGRWLKGFLEGAAEAG

SEQ ID NO: 374 - protein, 447 aa, Artificial Sequence
  Derived by Lab Evolution
MSIQRDDFPADFVWGTATAAYQIEGAVDEDGRAPSIWDTFSHTPGKTRDGDTGDTACDHYHRYREDVALMRELGVNAYRFSIAWPRVLPQGRGVVNGAGLDFYDRLVDALLGAGITPWATLYHWDLPQALEDAGGWPRRDTAYALAEYAAVVGRRLGDRLKRWITLNEPWCSAYLGYGNGVHAPGRQDFALSLQAAHHLLLGHGLATEALRAAVPGAQVGVTLNLTPTHPATPDPRDLEAARRYDGFHNRWYLDPLFGFGYPLDMWELYGPMVPHVEPEDLRRIAVPLDFLGINYYTRSVVRHAEQGPLLVEHVRPEGEYTYMNWEVYPDGIREIVARVAREYRPRSIYITENGACYPDGVEDDGEIHDSKRLEYYRSHLSKCAQAIREGAPLKGYFAWSLLDNFEWAEGYDKRFGLFYVNFATQERRLKQSGRWLKGFLEGAAEAG

SEQ ID NO: 375 - protein, 447 aa, Artificial Sequence
  Derived by Lab Evolution
MSIQRDDFPAHFVWGTATAAYQIEGAVDEDGRAPSIWDTFSHTPGKTRDGDTGDTACDHYHRYREDVALMRELGVNAYRFSIAWPRVLPQGRGVVNGAGLDFYDRLVDALLGAGITPWATLYHWDLPQALEDAGGWPRRDTAYALAEYAAVVGRRLGDRLKRWITLNEPWCSAYLGYGNGVHAPGRQDFALSLQAAHHLLLGHGLATEALRAAVPGAQVGVTLNLTPTHPATPDPRDLEAARRYDGFHNRWYLDPLFGFGYPLDMWELYGPMVPHVEPEDLRRIAVPLDFLGINYYTRSVVRHAEQGPLLVEHVRPEGEYTYMNWEVYPDGIREIVARVAREYRPRSIYITENGACYPDGVEDDGEIHDSKRLEYYRSHLSKCAQAIREGAPLKGYFAWSLLDNFEWAEGYDKRFGLFYVNFATQERRLKQSGRWLKGFLEGAAEAG

SEQ ID NO: 376 - protein, 447 aa, Artificial Sequence
  Derived by Lab Evolution
MSIQRDDFPAHFVWGTATAAYQIEGAVDEDGRAPSIWDTFSHTPGKTRDGDTGDTACDHYHRYREDVALMRELGVNAYRFSIAWPRVLPQGRGVVNGAGLDFYDRLVDALLGAGITPWATLYHWDLPQALEDAGGWPRRDTAYALAEYAAVVGRRLGDRLKRWITLNEPWCSAYLGYGNGVHAPGRQDFALSLQAAHHLLLGHGLATEALRAAVPGAQVGVTLNLTPTHPATPDPRDLEAARRYDGFKNRWYLDPLFGFGYPLDMWELYGPMVPHVEPEDLRRIAVPLDFLGINYYTRSVVRHAEQGPLLVEHVRPEGEYTYMNWEVYPDGIREIVARVAREYRPRSIYITENGACYPDGVEDDGEIHDSKRLEYYRSHLSKCAQAIREGAPLKGYFAWSLLDNFEWAEGYDKRFGLFYVNFATQERRLKQSGRWLKGFLEGAAEAG

SEQ ID NO: 377 - protein, 447 aa, Artificial Sequence
  Derived by Lab Evolution
MSIQRDDFPADFVWGTATAAYQIEGAVDEDGRAPSIWDTFSHTPGKTRDGDTGDTACDHYHRYREDVALMRELGVNAYRFSIAWPRVLPQGRGVVNGAGLDFYDRLVDALLGAGITPWATLYHWDLPQALEDAGGWPRRDTAYALAEYAAVVGRRLGDRLKRWITLNEPWCSAYLGYGNGVHAPGRQDFALSLQAAHHLLLGHGLATEALRAAVPGAQVGVTLNLTPTHPATPDPRDLEAARRYDGFKNRWYLDPLFGFGYPLDMWELYGPMVPHVEPEDLRRIAVPLDFLGINYYTRSVVRHAEQGPLLVEHVRPEGEYTYMNWEVYPDGIREIVARVAREYRPRSIYITENGACYPDGVEDDGEIHDSKRLEYYRSHLSKCAQAIREGAPLKGYFAWSLLDNFEWAEGYDKRFGLFYVNFATQERRLKQSGRWLKGFLEGAAEAG

SEQ ID NO: 378 - protein, 447 aa, Unknown
  Obtained from environmental sample
MSIQRDDFPADFVWGTATAAYQIEGAVDEDGRAPSIWDTFSHTPGKTRDGDTGDTACDHYHRYREDVALMRELGVNAYRFSIAWPRVLPQGRGVVNGAGLDFYDRLVDALLGAGITPWATLYHWDLPQALEDAGGWPRRDTAYALAEYAAVVGRRLGDRLKRWITLNEPWCSAYLGYGNGVHAPGRQDFALSLQAAHHLLLGHGLATEALRAAVPGAQVGVTLNLTPTHPATPDPRDLEAARRYDGFFNRWYLDPLFGFGYPLDMWELYGPMVPHVEPEDLRRIAVPLDFLGINYYSRSVVRHAEQGPLLVEHVRPEGEYTYMNWEVYPDGIREIVARVAREYRPRSIYITENGACYPDGVEDDGEIHDSKRLEYYRSHLSKCAQAIREGAPLKGYFAWSLLDNFEWAEGYDKRFGLFYVNFATQERRLKQSGRWLKGFLEGAAEAG

SEQ ID NO: 379 - protein, 453 aa, Unknown
  Obtained from environmental sample
MLQFPKDFIWGAATSSYQIEGTATGEDKIYSIWDHFSRIPGKIANGDNGDIAIDHYNRYVEDIALMKALHLKAYRFSTSWARLYCETPGKFNEKGLDFYKRLVNELLENGIEPMLTIYHWDMPQALQEKGGWENRDIVQYFQEYAAFLYENLGDVVKKWITHNEPWVVTYLGYGNGEHAPGIQNFTSFLKAAHHVLLSHGEAVKAFRAIGPKDGEIGITLNLTPGYAVDPKDEKAVDAARKWDGFMNRWFLDPVFKGQYPADMLEVYKDYLPDVYKEGDLQTIQQPIDFFGFNYYSTATLKDWKKGDREPIVFEHVSTGRPVTDMNWEVNPNGLFDLMVRLKKDYGDIPLYITENGAAYKDRVNEQGEVEDDERVAYIREHLIACHRAIEQGVNLKGYYVWSLFDNFEWAFGYDKRFGIVYVDYETLERIPKKSALWYKETIINNGLKAEKDK

SEQ ID NO: 380 - protein, 461 aa, Artificial Sequence; identical to SEQ ID NO: 201
  Obtained from environmental sample, modified with C-terminal His-tag

SEQ ID NO: 381 - DNA, 1362 bp, Unknown
  Obtained from environmental sample
atgcttcagtttccgaaagattttatttggggagctgcaacttcatcgtatcaaattgaaggaacagcgactggagaagataaaatttactcgatctgggatcacttttcccgcattcctggcaaaatagcgaatggggataatggcgatattgcaattgatcattacaatcgttatgttgaagacatcgcattaatgaaagcgcttcatttgaaagcgtatcgattttcgactagttgggcgagactttattgtgaaacgccagggaagtttaacgaaaaaggtttagatttttataagcgtcttgtaaatgagctgctagagaacggtatcgagccaatgttgaccatttatcattgggatatgccacaagctcttcaagagaaaggtggctgggaaaatcgtgatatcgttcaatacttccaagaatacgctgctttcctttacgagaatcttggggatgtcgtgaaaaaatggattacgcataatgagccgtgggttgtcacctatttaggatatgggaatggcgaacatgccccagggattcaaaactttacatcatttttaaaagcagcacatcatgttcttctctcacacggggaagcggtaaaagcgtttcgagcaatcggtccgaaagatggggaaattggtattacgttgaatttgacacctggatatgcggttgatccgaaagatgaaaaagcagttgatgccgctcgaaaatgggacggctttatgaatcgttggtttttagatcctgtatttaagggacaatatccagcagatatgttagaagtgtataaagattatttaccagacgtttacaaagagggagatttacaaacgattcagcaaccgatcgactttttcggatttaactattattcaacagcaacattaaaagattggaaaaaaggtgaccgtgaaccgatcgtatttgaacatgtgagcacaggaagacctgtgacggatatgaattgggaagtgaatccaaacggtttgtttgatttaatggtgcgattgaaaaaagattatggcgatattccattatacattaccgaaaacggtgctgcatacaaagatcgcgtcaacgaacaaggtgaagtagaagatgatgagcgagttgcttatatacgagagcatttaatcgcttgccaccgcgcgattgaacaaggcgtcaatttaaaaggatattatgtatggtcgctgttcgataattttgagtgggcatttggatatgataagcgctttgggattgtatacgtggattatgaaacgctagagcgcatcccgaaaaagagtgcattatggtataaggaaacgattataaacaacggattgaaagcagaaaaagataaataa

What is claimed is:

1. A polypeptide comprising the amino acid sequence of a variant β-glucosidase, said variant β-glucosidase comprising one or more substitutions as compared to a reference β-glucosidase polypeptide, said one or more substitutions being selected from:
(a) a substitution at the amino acid position corresponding to I63 of SEQ ID NO:379 (an “I63 substitution”);
(b) a substitution at the amino acid position corresponding to A68 of SEQ ID NO:379 (an “A68 substitution”);
(c) a substitution at the amino acid position corresponding to A73 of SEQ ID NO:379 (an “A73 substitution”);
(d) a substitution at the amino acid position corresponding to Y74 of SEQ ID NO:379 (a “Y74 substitution”);
(e) a substitution at the amino acid position corresponding to V167 of SEQ ID NO:379 (a “V167 substitution”);
(f) a substitution at the amino acid position corresponding to V203 of SEQ ID NO:379 (a “V203 substitution”);
(g) a substitution at the amino acid position corresponding to I216 of SEQ ID NO:379 (a “I216 substitution”);
(h) a substitution at the amino acid position corresponding to T219 of SEQ ID NO:379 (a “T219 substitution”);
(i) a substitution at the amino acid position corresponding to K231 of SEQ ID NO:379 (a “K231 substitution”);
(j) a substitution at the amino acid position corresponding to M246 of SEQ ID NO:379 (a “M246 substitution”);
(k) a substitution at the amino acid position corresponding to F292 of SEQ ID NO:379 (a “F292 substitution”);
(l) a substitution at the amino acid position corresponding to S296 of SEQ ID NO:379 (a “S296 substitution”);
(m) a substitution at the amino acid position corresponding to M325 of SEQ ID NO:379 (an “M325 substitution”);
(n) a substitution at the amino acid position corresponding to N326 of SEQ ID NO:379 (an “N326 substitution”);
(o) a substitution at the amino acid position corresponding to E365 of SEQ ID NO:379 (an “E365 substitution”);
(p) a substitution at the amino acid position corresponding to Q366 of SEQ ID NO:379 (a “Q366 substitution”);
(q) a substitution at the amino acid position corresponding to Y399 SEQ ID NO:379 (a “Y399 substitution”);
(r) a substitution at the amino acid position corresponding to V400 SEQ ID NO:379 (a “V400 substitution”);
(s) a substitution at the amino acid position corresponding to W401 SEQ ID NO:379 (a “W401 substitution”);
(t) a substitution at the amino acid position corresponding to R410 SEQ ID NO:379 (an “R410 substitution”);
(u) a substitution at the amino acid position corresponding to D414 SEQ ID NO:379 (a “D414 substitution”);
(v) a substitution at the amino acid position corresponding to L427 SEQ ID NO:379 (an “L427 substitution”);
(w) a substitution at the amino acid position corresponding to T441 SEQ ID NO:379 (a “T441 substitution”);
(x) a substitution at the amino acid position corresponding to E450 SEQ ID NO:379 (an “E450 substitution”); and
wherein the one or more substitutions increases thermotolerance as compared to the reference β-glucosidase polypeptide.

2. The polypeptide of claim 1, wherein each of the one or more substitutions is selected from:
(a) an A73 substitution selected from A73G and A73S;
(b) a Y74 substitution that is Y74L;
(c) a V167 substitution that is V167A;
(d) a T219 substitution selected from T219A and T219S;
(e) a K231 substitution that is K231E;
(f) an M246 substitution selected from M246H and M246K;
(g) an F292 substitution selected from F292I and F292V;
(h) an S296 substitution that is S296T;
(i) an M325 substitution that is M325T;
(j) an N326 substitution that is N326G;
(k) a Y399 substitution that is Y399F;
(l) a W401 substitution that is W401F;
(m) a T441 substitution that is T441V; and
(n) an A449 substitution that is A449C.

3.-7. (canceled)

8. The polypeptide of claim 1, which further comprises one or more, two more, three or more, four or more, five or more, six or more, seven or more, or eight substitutions selected from:
(a) a D7H substitution;
(b) a D154N substitution;
(c) an I216V substitution;
(d) a D243H substitution;
(e) a D302R substitution;
(f) an S317H substitution;
(g) an E365G substitution; and
(h) a V400Y substitution.

9.-18. (canceled)

19. The polypeptide of claim 1, which comprises an amino acid sequence having at least 45%, at least 48%, at least 50%, at least 60%, at least 70%, at least 80%, at least 90%, at least 95%, or at least 97% sequence identity to SEQ ID NOs: 199-379.

20.-21. (canceled)

22. A composition comprising a polypeptide of claim 19.

23.-25. (canceled)

26. The composition of claim 22, wherein the polypeptide is produced by a host cell that recombinantly expresses said polypeptide.

27. A fermentation broth comprising a polypeptide according to claim 19.

28. The fermentation broth of claim 27, which is a filamentous fungal fermentation broth or cell-free fermentation broth.

29. (canceled)

30. A method for saccharifying biomass, comprising: treating biomass with the composition or with the fermentation broth of claim 27.

31. The method of claim 30, further comprising recovering fermentable sugars.

32. The method of claim 31, wherein the fermentable sugars comprise disaccharides, monosaccharides or a combination thereof.

33. (canceled)

34. The method of claim 32, wherein monosaccharides are produced by a β-glucosidase in said composition or said fermentation broth.

35. A method for producing a fermentation product, comprising:
(a) treating biomass with a composition or with a fermentation broth of claim 27, thereby producing fermentable sugars; and
(b) culturing a fermenting microorganism in the presence of the fermentable sugars produced in step (a) under fermentation conditions, thereby producing a fermentation product.

36. The method of claim 35, wherein said fermentable sugars comprise disaccharides or monosaccharides or a combination thereof.

37.-38. (canceled)

39. The method of claim 35, wherein the fermentation product is ethanol.

40. The method of claim 35, further comprising, prior to step (a), pretreating the biomass.

41. (canceled)

42. The method of claim 35, wherein said fermenting microorganism is selected from Zymonionas mobilis, Escherichia coli and Klebsiella oxytoca, Saccharomyces cerevisiae, Saccharomyces uvarum, Kluyveromyces fragilis, Kluyveromyces lactis, Candida pseudotropicalis, Trichoderma sp. and Pachysolen tannophilus.

43. (canceled)

44. The method of claim 35, wherein said biomass is corn stover, bagasses, sorghum, giant reed, elephant grass, miscanthus, Japanese cedar, wheat straw, switchgrass, hardwood pulp, softwood pulp, crushed sugar cane, energy cane, or Napier grass.

45. A nucleic acid comprising a nucleotide sequence encoding the polypeptide of claim 1.

46. The nucleic acid of claim 45 that has at least 50%, at least 60%, at least 70%, at least 80%, at least 90%, at least 95%, or at least 97% sequence identity to the nucleotide sequence of SEQ ID NOS: 1-198 or SEQ ID NO:381.

47-71. (canceled)
